United States Patent Application Publication US 2026/0058010 A1 - sequence listing, part 45

SEQ ID NO: 503 - DNA, 1697208 bp, Homo sapiens
  source 1..1697208: mol_type = genomic DNA
ttctggattttgcaaacttactttttcaaatgatgattaaatattgcgtgctttaaaaagtaatatagttataggcagaagttccctttcttttattctgaggttgaaagaaaccgcagcccgataggattgcaagaggaacccttaaggaatctgctccttgatgggcgctaggaaatacacgtacatctagtacaaaggaatgcacatcacatggccccctgttttggaaagcttacagcatttcttataagaggatccatggtataagtgcaaacacagtcacatcacaggatgggaaaatgaacaggcgcctcagatcaagtgctcaaggctggaatctggccttgtccaatgccacctgcccttcagaaggcagggtggtgccacataaaatgaggtagactgcctggggagtcctggttccttgccagctatgtgaccttgaacaaattacaactcactgaacctcagactgactttattgtacaacaaaaccccctggaatatttgtggaaaaaagaggaagggagaaaggaaggaagggaggaaaggaggaaggaagaaagggagggaggaaggaagggagggagggaaaggaaaaggtaggggaagagcagagtttctcactccagtccagagtgggacccaggaagggagaaatattgctttaatctctctaagcatctgtgaaatggataaacctccagtatctacttccagttgttgaaaagactccatgtaaagtgcttaaaacagcatctggtggaaagtaaatgcttattaagtgctagtgtgtattaaggcgtcatggggcttctggctgtaagacatctgctaggaggacaatccctagaccccttcagcgtccattgcgggagtaggtggccaggaagggggcaggacaggagaggcccagctgtgcggggtgggggcgtcccaggccagccgcacccaccccagccctgcatcccatccagcctggagaactttttgaatcttggatagggctcgatctctgcctggccggaagatttgaagacttgccagaaaacttcctcagagaagaaatggactggggcaagaagctgcctccacttggcgtctctagtgggggatttgtctactttgattggggttgggaggagggcgctggtgctcaatgagtgagcccacctggggactaccaggacgaggacgggcgcaggtgaaagtcctgggctcattgccccagcatccaactttcaccctctgtcccctttaggccaggagaccagggtaccgggtcgcgtgtccgccgccgccgcccgctggaatccagggctgcacgcgtgaccgcggcggcggcggcgctggcgaggggaagggggagggggcgctccctcgcgcaccagattatttttggctccgcagccggggctgctcgctgcttgtcgcgcgctcacacacacacagacacacacgcacacacacacatgcacacattttctcgcgctctctccggctctcctttgtttattttctaatctatatttttactggaagatttcctctttattctctcccgccctcctacaagcgctcttgctggccgtctgggtgcacacaccgctccctcgatcaccccagcccccttcctggtctcccgagcgcggggtttgaaggtcacctcctttccagtccccgtgcgagccgcgctgccgccgcctcctccagccagagtcggtgggactggctgcgctgccctgaagtggttctccaagcagcgcggagggtggcggacggcggacggagcccaggggccgcgtcgggtggggaaacccgaactcgcggaggggaatccctccccctccgccccagccccccagcagcacccgcggtggggcgggggcgctctgccagccccgggaacagcagaggcggcggcactggctggacccacgcgcgcgcctccggggctgaagaaggaaggagtgagccgagccgagcaccccacatctggaggggacagccagccgtgggccccgccccggcgtccggagcaggagaactccgagcttcttgcccaggcagagagagcaggagcggaccgcgcgcccgggattgagagtccttgcgctccagacccccacccagtggccgccagggtccccgcctgtccggaccctcgccgcgcccaggcaggcgcgccagggcggggctgacctgcccgcgaagttgcggacagtgcgtgagaaaccagcacccccttccgccgcctccagcttatggtgagtgtggctgggggtgcagagagcgcacgggaattcgggggtctggggccgagaacgtgaccgcagccgggctcgccgggagttctaggtaagtccaggcggagtcattgcctctgcacccaccctgacctggtgggtcaggtccagaaggtctcatggagggaagcgctaggtccccgagaactggcctcctcctagcgccagtctgggcgctctggacgggaactttttcagggtgtgtggaaagatctcgaggcgtgtccccccctacccccaggaggccgagaccctgagcccccttgtgcgtcgcttccagaagcacgtccttccttgccccagagcgcccctccgaagcatccaggctacctcgtccgtcctcctgggagcgagtcctaggtgccaggagcagcgggagcctgcctgcgcactttgattagtctccctggccggctgcaagcgtgcactcagcgcgcccccggaccgctgcctccgcccgcagggtgtgcaggaggaggcatcttagtgacccgggagggtgtttaggtgccccgaaccccttgtgggaggaggggaagagaaggctcacttatgtggagaaagcgccgctgtgtttactggcactggaatcgatgccccgcggtgccacctcgaccccaggggagggggccagccgggaaacctgcgaatgggaaactcctactgtgcccctggttcctgggagccttagagaaccttcaccccagagaaggaaacacaggggtagcagatcttagccctgtgttgttgtgcaggccaggggggggcttgtcagctccaatcaaccaattgtccagctatggaagcgagggcggggctagtggggcgccgctcccatctccccaccgcccaggaggccacttggctgtgagctcctggagcctccctggcgccagctgcggggaccaggtgtcacgcggagcccggaagctgtccactcagcaagggaggggaagaccccgatctaaccttgtcctggagcccccagctccattccttgctgccagggaatggtcagggggctgggagagctcatcgctcctgtgtgggccagagctggggtgcacctgctggcactggaacatctggggtgcggctactgaagagcttggaaatcctggtcaggcagtccgggcaattggcaccccaaaggcggatcttttcagttgaacttgaaaagaagtgggggagtgtggtgaaatagctttgttgagttgaaacatcatgtctcctaacttgggttttcctttattagaataatgattgtttatttttatttttaaactccgttgtgcagagaggcctggccttgacagcccaagtttaggacatgccccagcctgccatcccttccctgccccctgtcctagttcatctcccctccatttatcattttatctttgttacaaaagagagaaaaaaaagatgagagggcctggattctttcaatttttaagtgaccacagaggccccggctggagctactggcagatttatttttagctaagatcttttatgttcagaagcaaaggacctggggcctgtgaagggtaaaggtggtgctggcagtggctgtgctggtaaaaagtggggctgactcaaaacctgtgtcctctttgagctcgtcagggaggccctccgtttggaagaatcccctgggctttccttaagttagcttatggttgcctcgggttaggaagaaaagtcatcattcctcgcggtagtggaagtgacaccttaggggtccagagagtggagctttatggctcagaagagcacagggcttctggatccgttatctgccagctgtgtgaccttgggcaagttgctttacctctctgagcttcgggttgtcacctgtaaaatcagagtttcagtcgtagttctgtcctcagagggtttgggggtaaattacttaaagcactaaacatttagaacagtttggcacatggtaagtgcctgaattctatgagttttgtttctttattctttcaagtagattcctctaatttttgagccttgtagcaccgagtggtacaggaaaggcaggtggcttgccttatacacacacgttttcttttaagtaaggaacagaagcctcaagctctcccattctgctctctgcatgttccaaggaggatcacggacaagctgcccacccactggccaagatataggttggtggcatttgacttgctgtcttgacaagcacctgaaattaagtttttgcagcagttgtacatttcttctgacccactgaaaggacttgatctccttggccccctgggatgaaagtattaccttagcaaatctgtttttttttttttaattagaacatcatttatttaatacatagaatattttgaaaacacaagaatcgaagaatattagaagtggctttatcattcctcctgggattcacacattgcaattagtatgtttagatataaaattttgtggccaggtgcagtggctcatgcctgtaatcccatcactctgggaggctgaggtgggcgtattgcttgagtccaggagttcaagaccagcctggacaacttagcaaaaccctgtctgtactaaaaatacaaacaattagatgggtgtggtggtgcacacatgtaatcccagctaccctggaggctgaagtgggagaatcacctgagcctgagaaggttgaggctgcagtgagccgatatcacgccactgcactccagcctgggtgaccagaatgagaccctgcctcaaaaacaaaacaaaacaaacaaacaaacaaaaaacaatttgtgatagtatctaaacaatttgtgatagtatttaattgtataaacatataaacatctgtggcacacatttgcccataaatgaactgaatgcacaaataccttgatccagtttttagaaagaattttagttttgttgtggcaagaacacaacatgggctgtaccctgtgaaaagatttctaagtatatcatacatgactgttttaaggatagtattgtataggagatgtcaaggagttatttacctttactgcatgagggattcggggatctaaaatcgtcaaactcatagaagcagagagtagaaggttgtggccagggtctcaggggccagggaaatgaggatttgctgatctaatcaacaggtataaagtttcagtaatgttgtaataaatcttgctgtccgtagaacgtacagttttttacatcaccctgaagctacagagttttccactcagaaatgaagctgaaacatgggtctgagcgggtttctcctcctggaattgacccactctgccctatttttcttctcattataattgaagctatatatatatatatatatagaacctgctcctgtaaggtttgagcacaggtcttctagacatcctcatgtctctgatgattttagaaaaaaattaagcttagtccttttagctcgaaccatcccaagctattatattttatcaaagtcctttctgatagtacatattttttgtatccagaaaattgggtctgccctgtataggaatctgacatttcacctttccaaaaattagaccatttcgtttgcatcctttaagctgatgtgtggagtaatgaacacattccaagagggaaatcgtatttgacacagaaaatactttggagacgcagcgatttcccagtggcgtgtaaggagactattgaaatcctagcacgtttgctctgaaggacagagggcagctcgtcctgcctttgccacccagcatgggagttacacagtaagcatcatccacaaattaatactggctgactttcctaaaatcatcctttaatctgtcgctttcacatttacccacagtgtcgtgccggagacctcaaacaccgaggcgacgtttttaaagaagccacgaggctcttcccaatgtctacctccattatttaaaatactgcctcgaggcacaggtataaatattaaaactttaattaaagaatcaatcagtgatggagcttcaaaacaaggggatctagcactttcagatgatgtcaactgtgaacacagttagactcggtcgtagggctaggagtttttatgaaaaatgacgcgtggagttatatacacaggcaactgtcctcattttttgaatctgtagtcattgtgagcactgtcactcattaccactggtttgtcattgttcgctagtcaaagagacatgggtgactgtggcctgctgctacagaagagtgtgttgtcttaggggaaggagtggctaatgcaagaaatatttatttggaatgtaccacatgttagaccctgtgcttggtgaataaggcagacgagaactttcctttcttgtagcttatattgtcgtgggggaagccgcgtcataagcaagacgttgaaatatattttcataaggataatgaaaagggttccaaaaattatagtgtgatagtgacttggggggacattccagagaggagagatttgacctgagaagtacatgaaaagaagtagctgatctgtatggatccatacatttatccaatgagtattctactcatctccgctttcttttttttgaaacagagcctcacgttgtatcccaggctgtagtacagtggtgtgatctcatctcactgccacctccacctcctgggtacaagtgattattatgcttcagcctcctgagtagctgggattacaggtgtgctctgccacgcctggctagtgtttgtatttttagtagggatggagtttccccatgactggtcttaaacgcctgacctcaagtgatccacccgcctcctcggcctctcaaagtgctaggattacaggcgtgagccaccacgcccagcctcattcacccctactttctatgaattcctgagtgttcatcaggcacccactgtgtgccaagcactattgaaagcacttcaagtgcagagtgatcaatacatgcagataccttgtcctaaaagacttccgttctaggatagttgtctgcatggagggcgtttcagagaaggggaccaacaagcacaacgatccagaggctggaatagtgacaaaatcatacagttgaaggttggtcctataggcccttgtggcctgggaagggaccctggctgttattctaatgggaaaccattgggggattttatgcagagagataccaggatatatttatgtcttaaacattatgggaaaattgttaggtgtttttgagatgagtgaataaacaagcatgccttcctggccggccggctctattttttcaaagtttcaattcatttctatgaccagatttggtctgtggacgtagtgacatctgaaaaggtaagccttgcaacgtctgagaaattaaactcgattccccaccaccacctacttcgtagggcttacactaaaatctttcattcaagaagagggattactttatagggaaaaagaacctcattttccagtaatgttctttgtgtgagggtggaagaccctgggaggatacatctgtatacattagcctacttagattttctttctctggggcctcccttcaaagaggcaacatcatgtgttcttgtgtgcctgcatgagcagccgcaccctcccaccaccacatccttttgatggcttgactgacaagtctcctgggagtaccctgagaacagttgcactcagatgccctttattgatcgtctgtccgggtaggttccctttcagagtatggccacagattctcccattggtaggtgtgggccagggtaataacagatattgacagtgcaaagtgggttgcttatggagagctctgagtgcagccgacgttgtccatcttcagaggctaccctgcccttagaaggttgaggtgcaatttgttggagggtttggacacctggacaattcagttttcctcccacattgactgtctctttatccacaatactggaactgcattattgcctattatatgtgacatgaacatcagaataagtgtacatggattgaactcttcctatgtagcacaagctgagccaagcactgtaccttcatggctgtgtgttgtgctatgtgtttcaggcatgtgatcgcctcccccacccacccagcagttcaccttattcgattcctgctcatccttcaggttacaactcaaaagccccaggcttagagaaactgtccctgtttgcctgtgtcgattctcgttttttacagccatcccaggggcatcttatattttattgagtgactctgttttatcctttttctcttactccactccatggtcaactgcaggtggaccatgcatacacctgtttggacatcactgtctccttagcatctagcgtggtgcaaggcacacagcagaagccccatatggaaataatgaattattccatttgatgcttctcacacactttgaggttagtgcttttcagatccccattttgcagatagagagtggggtgtaggcaggcgttaagcaatttgtccaaggacacaacagcaggtaagaggcacttccaagattttgaacctgacagtctgagtccacagcccctgatgctcatcactgtgcacatggcctcttttgctgcctttgcaagatacaagggagggtgggaggcaatgtgtgcagtggttagggagctcttgctgcatagcttgagttgctctgagaagtgatgctgagcccattagagccacaaaaggaaaacaaggcacttgtttctatttattgcagtattactttatcgttgtgtaagagcctcgctagatttctgcactggtgcaatctggctcttgttttgttgtttgtctccttggagtctcaaggccctgggttgcccagggcatctctggcctctttatctaggctcacgctctgagtatgattttgagggagcggttggaccacctgcctggttacaggcagtccttgggcatcatgcagtcacagctggagctgctctgatagccactcaaaatgtggtgtgcaaaccactgctcactccatctaatcaccgtcatctgaatcagcttccctcttcatttcttctgagaacaaaattagatctttgccagcataatggatgaacttgtgcaatcaccttgttcattgctagttctgcatttccccaagatgttgatgtctcttttctgtgaattttagaatatagagtgtcagagatgagggtgaggacttgaggttttcaaaattgtcttctttgtaccatggttgggaccctaatagctatgacactcactggaagctccttctgtgctagggcttcctgtgtgtcatttcattaactcttcatggcaaaccctttattataccacttgacagatgaaggaactgaggcccagtgactaaatggcaaaccgagattgcagactcaagcagttctcttcccctgctgtgtgtggagagggcatgcttgggatgcagggaatagcagaggcaccatgataaggtactaggaaggaggcagtgcaggtatttcactgagattccagaatcagtgtgtctggcttgagatcccagctccatcactttctaagtccataacctttcactttcttcaatttctctgaacctcagtccatccctacaaatggagattatcactacattgtacagtccgtctgaggattaatcagcctggtaaattattttagcaaagtgcctggcacctagtgtgtgtttagtgcaagtaggagtcatagggctgactatgataatcatgacgattactattatccattgataataatgatatcattattaaccttgtttttgttgctagaatttcacaatccctttgggcagcaaattggtcccagaatgtgcttcgtatattttcctcttgactgtaactgaggtgacaaattgagagtgaagggggaagaacccagcgtagctgcaaatgtacggttgagatcgttgacagacttgaggccctgtgtggagttccgcctgcagaggatgctgacagcagccatatgcatgggctctgattgattggcagagagaaacactaatttattagactcgttatgaaaagtgacggagcaggggattgagagggctgattcagcaacagtagccctggctagatcccaggggtattggcttggtgtctgtttcccttgggaccagccccctgtcttgattctgggtcactgcctgtgttctcaagtgagtctcctgaagatgtccatggcatggctcacttttaccacgttgtaaatgtcatacctatttcttcagtatccttagaaagctgagtccagttcaggttgctgttgattgcaaaggctgataagaggagggagggagtgtgtgcatgcagaaattccccagtggagggaaaatagtccttttcacaggttagagaaagtgcagtagtttccttgagggagaataaagggcatggttgatacctctctttaagaacatgatgaccgggcatggtggctcctgcctgcaatcccaacactttgggaggctgaggcaggaagattgcttgagccaggagttggagaccagcctaggcaacataatgagaccctgtctctgttaaaaaaaaaaaaaaaaaaaaaaaaattagctgggtgtggtagctcatgcctgtagtcctagctactcaggaggctgggacaggattgcttggctctgggagtttaaggctgctatgagctgtaattgtgccactgcactccatccttggcaacagagcaagaccctatctgtaaaaaaaaagaacatgaagctctttgtagaaagatttctcatttctgatttggagagattgttcagtctgaattacagcaggtaggatgctggttaaagaagtgtcttgccttcaaggtgataaggcactgaatggggctatgttggagtcagaaaagctttgagaagactgaattccctgagcgccaaggtgcgaaaggacaaagtcatggcagccaggtacacttaacttgtggatccagattctgccacttcctggctgtgtgagcttgggccagttactgcacctctctgagcctccatttacttgtctattaaaaggcaaatgattctgtctccaaggatggctacctgggagtgagttaagtcaagcagcaatcacacagacttccgagctagtcacttcttatttttttttaccttgtggtattcagacaatagcctctcaccccatgactctttgatacaaaaggttccctagttagtgtgctgtgatttgtggaaagatattttgtttcctagtgaatttcattcattttgctcaggaaactttattggttttgtctgtgtaaacctaaaataatcttcaaaagttcataacaagaacaaggaaccatccaccccattctataaacttatttctactgaattgtgcttcgctggtgtcagtttataatgagaaatagtataagaaagccgattagccacaaattttaaaaacttgacattatatatgcacactgaaagaggatagactatttaaagtttgagaatttttacagttgaatctagcatttgaaagaaaaacatggccgggcgtggtggctcacgcctgtaatcccagcactttgggaggctgaggcgggtggatcacgaggtcaggagatcgagaccatcctggctaacatggtgaaaccccgtctctactaaaaatacaaaaaattagccgggcgtggtggcgggtgcctgtagtcccagctactcggaaggctgaggcaggagaacggcgtgaacatggggagcggagtttgcagtgagccgagatcgcgccactgtactccagcctgggcgacagatcgagactccgtctcaaaaaaaaaaaaaaaaaaaggggaaagaaaaacatgttattgaatgtaggtgagggataagaaccaagaacttctggtaagaacccagcaggacaagcgagctatgaagaattcaactctctaatgttatttgctatgattattattgttatttttttgagacagagagtctcatttgttgcccaggctggagtgcagtgatgcaatcatgtctcacttcaacctctgcctcctggactcaagtgatcccacctcagcctcttgagtagccaggaccacaggcatgtgccaccaagcctggctaattttcgtgtttttaaatttttgtatttttttgtagagttgtgatttcaccatgttgcccaggctggtcttgaactcctggggtcaagcaatcttcccttacaaagtgctgggattacaggcatgagccactatgcccagccctatgatgatatttttgaggactctgttggctattactgtgttagctttggtttcaggatcagaaagagtttgtcctttcttcaggttctgattggtatttatgtaccagacacttctaagtggaatacctgtccatgttcccttttcacaaagcctgccaggaatctcagagctgattttatagttcagtcacagtagtaaatagaatttgatagcatggattttgcgtattaacctcacttttgactcagttttatttctctacccttccattttaattttctctttttattgtgatgtatgttactgtatcaaaagaatacctttgcaaggtacctaatgtgaacatattcaaatattgaataagaaagcaatataaaggtatataaggtaggtgaacattgaaaggtatacataaattacagccctttaaaacaccaggaaccctggaaaataggaccatatagtgcagtgcttggtatcttgagctagacctgaagttagagaaatgcaattttgagtcccaacagtgcaaatggttactctttcttattttctccttttaaaaaacattttcctggagcactatttatgctatataaattcacttttattgggccatttattgcctttttcatgcattcagcaaacatttttgagcccatgctctgggccaggcactgttaggcactggggatactgtatggggtgggtatattgaccaatattgacatcatctctgcctagtgaaacttatgctgtagtgagagagactgacacgaaacatgaatgcaggtaaaaagacaatagaattacccgttatcataagtattaaaacggcaacagaatggagcattcatgtaataaaagagtgagtgaccctgttcggtaggaacatcagggaaatgtctccaaggagaggtattgggccacatttaagctacggcctgaagactgagaagggccaagctgtgaccagtggggagaagagaagagaggagaccatggtgagcagaggtggcagtgtgttcagaagcccgggggaggaaggagagggctctgcacatcctgagaacagcaaggtggccagcgtgcctggggtggtgagagcaagggaagggatgtggctggcaaagcctgcagaggccagaacaggcagccttgctctcaggagcctgtgccctgtgttatttttgagatggggaagatcttaactagtaccatcctttataagcatattcaagataggtgcgagaataaggtacaaggagcaccatgccagaaaagcaatgtgtgtgcctctgtgtgtgcatgtgtagatgtgtacacttgtatgtgcacatgagtggatgtgcacacacatctctgtatgtgtgcaaacgtgcatttttgtgtacatttctgcacgtgtgtgtatgtatgtacatgcatgtatgtggcatgcgcatacgtgcatgtattgcagcaggaagagaaggagccacgaacagtatgacagtggggagattgctgacttcagagcccagcagaatgagggtcagtgttgctgggcacgctgcttacagcatgtgcagagcatagctctgttttgcctcacatccctcctggactgatccctttctgtttgtatggtacattcagtgagtgacagcatcacaggaggcagaccccagccttatgaacatatcttcataacaccatacagtctcacgagaaaggggaggtcatttgttcactgtagtccacccctgaattgttccctcactggctctgtgtcactttcagagatttttttaaattctgggaaatgctttggggacttcggcattttggagtgtgttttcaaggattgtattagcaccacagagacccttagcctctttcttaaaggttctgtttttagacatcctcctcttttatccgtgctttcaattctgctgcttccttccttctgagattccttcttccttgctggtcttggaacaagaaacatttagctgtattttcctcgttctcgcctaggtagggtgtggtccccctgtgtcctcatttgttcaacattttgagacaaagattggtggaattgccacttaaaaaaataaaaccagggaaagcagctcagagaatttaatttgcctctaacccaactcttctacttattaaaaaaatatacaattattcattccgtagcactccagattgcttcactgaaagaaagaaagaaagggatccactccagggagaaagaggctcttgagctttttgttccttgatgatcctgtctttacgtaatttggtggagcctactggggaatcatcattttgggagactatggatgtgcctcattgcagaagaataagtagagagcagtgtctggaacaaatgcttgtcttaaaaaaagtttatgaaatgccagcagatgtcagtgtgcccttgccatttgattttttttttaaagcaacattaattattttcggtagtaaaaacaacacaagtatattctgctacagttataaatgaaaagatcatgaggcaacgttttttaggtttggagaaggaccagcagaatttatgtcataaggtaaaatcctctaaattatctgtgtaatataatttgtcttttcccagaaaagtggtttcaaaatgcaaaacctagtgtaagttttttttttttttttccctctctcccagccattgttcaggtgccaataatagcttaggatccagcttagcttctgagaagctactggctctgctaattgataacagctccttatttcaaagctggagtttgcaaaggaaggtagtgtagggttgggtatggccttgtcgtttgtcatctgagttgtgatgagaaactcttgcagtttacgttgttaccgtgagcacagcaaattgcgtgctaatagttagttcctccgcagacattgtttggatcaaaaatgagggcctctatacaggaaaaagattcactcaaataattaaaaactattcattttaagcaagggataatttgccagcatgtagtgcaagagaggtagggtcgtttctaggcagggaatgatgtatgttacagggcatatttgatgctttgctttatttatttaatagttttgattaaatggtacaatattcaaaaatgcaggagtatgcagagaaaaataaatctctcttgcacttgccttgcagtttattagagacaactatttttatagtttctcatgcaccctttcatatatattttatgcgaatacaaacatttacacagatatttataccaacaaaagatagcatatgaaatgcatagttccactgtttgctctttttaaaaaaattaagaataccttttaaggattattccctctcattgtgtgtgtgtgtgtgcacacgcacgtgtattttttctgctccacctttgttaatggatatatagtattccattgcacatgcttacattatttaattggcctccttttgatggatatttatgttgtttccatttttgaagcgctacatggaatatcttcaaccgccaccacttcccacacatgtctgtaggatacattcttagaggtgaaattgttaggtcaaaggaaacatgcctttcattttgacagacactgccaaacctgatgctctggctgagctgcacccttacatgttggtggatgaatggggtttagaaccaaatgaagccatgtggtgattctggtctgacttggctaccgtgatgactgtcatgaattatgtccctattggaagtgtcttagtctagttctgctgctataacaaaatgcttatccagggtgatttagaaagaataggaatcgttggccaggcgcggtggctcatgcccgtaatcccagccctttgggaggccgaggtgggcggatcacctgaggtcgggagttcaagacctgcctggccaacttagtgaaaccatgtctctactaaaaatacaaaaattagctgggggtggtggtgggtgcctgtaatcccagctacttgggaggctgaggcagaagaattgcttgaatggagtcggaggttgcagtgagctgagattgcgccactgcactccagcctgggtgacagagcgagactgttgcgcaaaaaaaaaaaaaaaaaaaaaaaaaagaaaagaaaagaaaagaaaggaatagaagagaagttgttttctcatagttttggaggctgggaagtccatgatcaaggtgtggcaagttcaatgtctagtgagggatgcccgctctgcatccaagatggtgcttcctggctgcatcttcatatggtggaaggtagaagtgctgaagagtctgactagttctctccaacctttgggtaaggttcccatctaagcatgaaggcagagtcttcatggtctaaacagtccttaatagtgttgcattggagaataagtttgaacgtgaattttggcggggacacaaaccttcataccgtaacagaatgttttgcagttcttgtcattgctgtttttttgctaacactttccatctgccaagtagtttgttaagatctttaattccacgttcacatctttgtcctcataacaaccctgtggagtagaccctgctctcatcctgtttcaggatggggatgtgggggctgagagacctcaggtgctttgcttagggttacagggtggatggtcagctcaggagtcacactcagggcctctaggcttaaccattgagctgggaagctgtggtgggttttaagcagcagagagcatactattgagttacaatgagtttaatgtcaacccgattgtgctgttgaccttttggattgcataattatctgttgtgcaggctgtcctgtacactgtaggatgtttaatagcatccctggcctctacctgctagatgttagtagcacccccttcacccatccatgacaaccaaagacgtctccagattttgccaaacgtccctggggtagaaccttgccccactaactcagacaaagagcaaaatatgccgtgggcatctgtagcataacaccagagacatgtatttgaggacacacatggtggctgatgtcagggcatcttccattcagccgtctcagccaagggacactcatttagttcttccccaaggatggagcagatgggctgccccttgtggcagatgccagtctaggaagaaacaagacggtattactcaaaccatttcatcctccattcgatcacagtagcactgcccaacaagactttgtcttttaaaatgtagtttagaaacgtccttgaaaaattgcctggtaaagtagacttataaaaaattatgttcccaactatagtccagcttatatattatacagcttttctattcctgcattttcctttggtgttcagtaatgctctacatcaaaatggcaagcgggaggcatcagccctcccagctccctgcacgtggcagacattgataatcaattcttttcccccctcatcagcgtcaccttcttagaatcctcagtgcatctctctaggcatagactgtcaaccaattggaattactatgtgaaatgaaatgtatttgccacccctgttacatggtgcctttttggctgagaagaaggattacgctttccaaagaggcaagcttatcatgaggtattagcttatttttcagttactctgagaaaagtgcttgatagatgggaagaaatgtctattcttaaagcatttggaattacgatcttattttgtaacagtaattgggtgcctgaagaatactcctctttcctgaggtgctttacatatactatcatcctatgtattattgtttttctgtagtaacatctctctcccctccaccaccaaaaatcagtcccctcccttcaaagcctggtggaggcagccacctgagggtgacacaaaacgctttgtgtacaatgggaactgagacaattccctcagcaaagaacattgagaagctgcaggacgttactggaactgtgtcacttctcagcacagggcatgtgagggagctttaaagagatggggaactgaaccatccaagatttccagaagtaacttctgatgtataaaggcatggaggccaggctgctctgggaaggcaacacaggtttcagagttgaaaatgcttttaggtggcatcatagaaccatccattctagcataatgttttgtgttttttttttgccattgcttttttggggaggggtggaaaaactcccatggaattgtgtggtaacttggtaatttggtttagtaacttgatgaacctatatgcaaatacctatcacttagatagtttttaagtcatctcctgtttctgattctaagaaaatagagaaaaataatcttggaaagaaaaggccctgggtcagacagtgtctgtctctttttatttttcagactggtgggaatgttttcctttctccacttttagatgttttagtctgtgagagatagggacaaatacaacacgtctcctatttcctcttctgagaaaggaatttttaacttagatgggaggcaccagtgaacttcaagggcttgaaattgcatttaaaatttaaagaataaacatttttatctgggcagaaggctcatagctttttaaaaatcacattctcaaagtgctatatgggacacacaaaaaagtaagagcccatctttttcagaacaataactttcagactcttttaccatgaccctagtaggcaaggaaaaaggatactacagcccaaccacttcacctgttttaaccttctggtgggactgtgtgtgttggaggtggggggagacagggaggtcacagaaagctcagtagtgatgaaggattggggtgcaactgtatttggtgggagagatacttacctcttacttagcagtaggaatatgcatttatttgagtcacaatctctgtatgtcttaaagtccaattatttagaaattatcagaaaaaagtgcagttaatgctaaagtgttagcattaaccaaaccccataaaaccacaacagtaatgttttcttaaaacattgaattgagtcccgcttaacaactttgataatagcatgagatcagaaagtccttcctgaaaattccaagaatgaaagccgtgtgcatgagtttttgcgggagaatatttgcaacatttctgtgaagttcttgatagctagacttcctggtacaacatttaattgtagtccttagtaaacttttgtaataatttatgttgatttttcaataatactttcaagttttcaattttactaactcagtggaatactactgttggtatctattggtcacttacaaaaaaaaaaaaaacagtccgttgaatgcattttctttcttttttttcttttttttgttttgttttgttttattttttgtttttggagacggaatctcgctctgtcgcccaagctggagtgcagtggtgcaatctcggctcactgcaacctccgcctcctggattcaatcgattctcctgcctcagcctcctgtgtagctgggactacaggtgcccgccaccacgccaggctaattttttatattttagtagagacagggtttcaccgtgttgcccaggctggtctcaaactcctgaactcagacaatctgcccacctcggcctcccaaagtgctaggattacaggtgtgagccaccacacctggcctgtagaatgcatttcaatgtgcataacgctaatgaaaagacttgcagttttggttcagttaatggcccattgtgaggactctttaggtctgtatacttaggcatgatacattattgctgtaggaagttagagaagatgggaagcacagggcttccattctacagatatccctatattttttggcgggggattgactccgcaaaccatattttctaaactttttcatatatacttgcttatgaatatattggaagcaagcctatatttatttattattttattttattagttttttttttttgagatggcatctaactcaccctgtcatccaggctggagtgcagtggtgcaatcttggcccactgcagcctccgcctcctggactcaaatgattctcctgcctgagcctcctgagtaggtgggattacaggcgtgcaccatcacacccagctaatttttgtatttttggtagagacagggttttaccatgttggtcaagctggtctcgaactcctgacctcaagggatctgcccacctcagcctgccaaagtgctggaattacaggtgtgagccactgcaccctgccccaagctatatgtacactgtacctcaatatccatatatatatccgtggagatatatatatatatatatatcatccatatatatatatcatccatatatatatataaaatccatatatatatatatatctccatggagatatatatatatatgtgtatgaatgaagcacttagtaggagcttttgtgacccattattaagcaaaatgaataaagttcattaaaatgaaactgtatttgattgctttagagctttgattttttttttttttcttgaacaaattctgcagaaaagctaagtggaattatttaccacttgggttggatttttggttatccttcctatttaaggccacacccagcaatcctaatagagttgaatggctgtgtttttaaatacgcagtgattctattggactcatgccaagcagcatcctggattttctgtgcatcagtgtctatgtgtggattagcactgacatattacataccagccaatgtcctctgctctcttcatgtatgctggtttgcaaaaaaaaaaaaaaaaaaaaaaaaagtagaaaaattaaaaatgctgaatcccgcagaaagtttccactccccagaccaaactgtgtgcatagcggggagaagggaccagatggccagtgggttgaaatcagtggaaaaccagctgggatgcatgagagggcatttcctcttccacttccctggaagcctggtcggggcaagtcctggaggtctgagcaggacaagaggtgtcaatgtcatggcctctgtctggctttctggatccttagatgaattgcagttggattggaatttggcacaaaaatctgaggataagctgttagttttctgctttctggaaaaaaaaaaaaaaaaaacagaacaaaacatgccagcttgacagaaggttggagggtaaaatgctgatgaacaggaaagaaccatatttccctgcgttagcaccagcttggagaccgaagttctatgaggagggcacatgatttgggtagttttgaatcctaaaggcaggatttttttcccctctcatttaaagcaaaacctttcattgccactgaataattatgcatttcttagactgccagcttctgcaacagtgattcctaggccccagtttgacactgagtgtgttcagttattttgaggaaagttacaaacgtttcaaattctctcacctctaataaaggtttaaaatctgccttttatggtgcctttttctgggttaacatattagttatctatagctgcataacaaattaatgcaaaacataccaatgaaaacagctatcttttgaggtctctcctgatgttgcagctgagatgttggctggcgctgtgtcacctgaaggctcagccggggctggaggatgtctccaggctcacctgtgtgtgttgagaggcctgagcccttcagtggttactgatcagaagcttcaattccctgccacatgtgccatgatagagaggtgcttacagcatggcagcttttgtcctttagagcaagaggtagggagagagagagagtccatgacttttttgagatagcttctcctattaacatctgatctcagtgtggtgtatttgttacaattcatgaacacacgttattacattacatttttattaaagcccatagtttacatattaattcactctgttgcatgattctatatttttaatgttttattgtaaaatacacataaaataaatgttaccgtcttaaccattttgaagtgtatggttcagtaacattgaatacattcatattgttgcgcaagcaacactatcacccgtctccagaactcctttcatcttgcaaaactgaaactctgtacccattaaaaagtaactcctcattccttccttccctagtccctggcaaccaacattctactttctgtgtttatgattttaactactcttaagtatctcaaataagtggaatcatgcagcatatgtccttttgtggctggtttcttttgcttagcatcttgtcctcagggtttatctgcgtggaagcaagtgtgagggtgtgaattaatcattctttctttctttctttctttctctctctctctctttctttcttatttatttatttatttattttgagacagtcttactctgttgcctagctggagtgctgtggtgcagtcttgactcattgcaaactctgcctcctgagttcaagtgattctcctgccttagactcctgagtagctgggattacaggcacccaccaccatgcctggcaaattttttgtattttcagtagagactgggtttccttatgtggcagtctggtctcaaactcctgacctcaattgatctgcgtgccttggcctcccaaagtgctgggattacaggcttgagccaccacaccccacccctttttaaggctgaatgctattccattgtatgtatataccacagttggcatatccattcatcttttgatgggcccttgttgggttgcttccgtgttttagctattatgacagttttatgggtttggacaaatacataatgttacccatccaccattacaatatcatagagaatagtttccctgctgtaaaagtctcctgtacttcacttattcttccctccctgctctccccctgcaggttcctggcaaccactcatctttttcctgttttgccttttccagaatgttatatagttagaatcacatgatatgcagccccagtaggttttatgacctagtctcagagtcaaacagtattatttctgccttattctgtttgttagaagcaatttcatccttctttcagggggagggtaattgtgcttcactacttaaaaagctggggtggtggggagaggagatatcaaagaattttcagacatgttttaaacaaccatagttaagatgacaagactagaagtccaagcattcactgggcatctattctgtgttgggcactgttctttcttagtgttttatatgtactattcattcaacccttacactaatgccatgaggtcactctcatatttatcatccacattttacggatgaggaaactcctcatccgtatgtgactccctgaagccacatacctcataagtggcagagccaggatgcaaactcaggtcagcctgaaaccaaagcctaagtcttgaaattatatcacgctgttcccttttagtgtaaggggaagtcttagtctaaggcttagattcaggggacaaggtctgaccaaatacatcagaagacatcaatgggcgatgatgctaaacatcttccagttgcctctccaaagacattctttgtccttcctcagtgtgtagtttccattgctgctggaacaaatcatcacaaacttaatattgatttcctgttttaaagttctatagctcaggaacccagtgtgttctcacttgcaatcatcagggtgtcagcagagcttcttaccttctggaggccctaggaaagaatccctttccttacttgttccaacttcctgagactgtcggcattccttggcttgtggcccctcctccatcttcaaagccagcaatacgggcatttctggtcatctccacagtctcatctcctggactctctcctacttttttttttttttttgagacagagtctcccactgtcgccagagctggagtgcagtggtgccatctcggctgactgcaacttctgcctcccaagttcaagtggttctcctgcctcagcctcccgagtagctgggactacaggcacacaccaccatgcccagttaatttttgtatttttagtagagacagggtttcaccgtgttggccaggatggtctcgatctcttaacattgggatttgtccacctcggtctcccaaagtgctgggattacaggcatgagccaccgtgcctggccctttctcttccatttctaaggttctccgtgattatactggacctatccagatagttcggaatcatctccctatctttaggtcagctgcttagcaaccgcaatccatctgcaaacttaatttacacatttaatttacagatatttacaggtttttgggaataggaggtagagatctttgggaatgttgattaaaaaaagaaactctggaagatatttaaagaggtttgttctgtgccgatatgagtgaccatggcctgggaaacagtctctggtggtcctaagaaagcgtgtctaagatgactgggttatagtttggttttgtacgttttagggagacagaagttataggcaaagacaaatcagtacatgaaaggtatacattggttcagcaaagaaaggcaggacatcttgaaatgggggtaagtagcctgcggcttacagatcatagttggattcaaagattttctgattgacagttgattgaaagagttaagctttatctaaagacttgaagctggtagaaagaaatgcttgatttaagataaggggggttgtgaaaaataaaatgcttagccaggcttggtggcatgcacctgtagtcccaggtacttgggaggctaaggcaccaagaatcgcttgaacctgggaggcagaggttgtgttgagccgagatcacatcattatactgcagcctgggcgacagagcaagattgtgtttccagaaaaaaaaaaaaaaaaaaaaaaaaaaaaaaaaaaaaaaaaaagataaggggcgttgtggaaaccaacatcttgttacgtaggttaagctttcagatagcaggcttcagagggaatagatggtagatgtcttgttttcagatcttaaaaggtgtccgtctcccaccgaatctgtgctagatccagggaagtcctggctgcattcatggaggttcttcatagattcagaaaagacagctttgcagggtcatttcaaaatatgtcaaagaaacattttgggatacaatattttgatttccttcagagtctgctatctgtcatgcgatgctatatcagagtcaggttggaattgggtatcttattcccaaagagtctgttttgtcagtctaatgatttctatttgaatgctaatgctgaagtcagttgtgcctaaactcaaaaagggaaagggcataaggaggtgtgtctgacctcccttttggcgatggccagaaatttcatgtttcaggtttcccttggcccagggggagtctgttcagtcagttgaagagacataggattttattttaggtctcctgcctttcctgctcttttcccaggaagccagtatggaaggagaactccaggggctcttctgccctttgattgtcagctgagttctgcttatggggagttttggtgggagattggagggaggtggttaaatgataccaaggcttctattgtcctgtgtccttcctgagtagcagagaggaccggcctctgcttgctgtcactaagcagccagcctcctttccttctgggaccctctaacttttccttcacctcagccattttggcccagggaaaataattttgctgctactaattctaggttgctgcatagcctgtgtggtttcccggtgctctgcctacacctttgaaaacagtattctgtaagtaagatctccttaactaatcctaatttgagtatgccatctgtttcttatctagaccttgactgatacagtgactgagggtagtcatatttgaagttaaaacagaaaaaaacaaaacaaaacaggtatgtcttgaattaggctaggctaaatctttcaaagcgtgggacttaaccccttgccagagatgttgatgtgaaccccgaatcctaaggtgctgtgttgttttcagaagccaagtgaaatttccacatgaaagcaaagctttgtgcgttcttaaccaagaaggtccttaggatgtatacagtgttctctctttgagttcctcctggtgtctgttacaacagatgaggaattcaagaacactgccccttccatattcgcaagatgtgacaggctattgcccttgtcttagaagacctgttttaggttaaaaaaaaaaaaaaaaattcaaacaattccacaggtgagctaatgagctaattacagagagtggtttcaaaacattggcattccacaagtaaacagcatctgcctttgattaaggtgtgaaattttaaaaaggtatggaaagatggctagtatcttcaggtggcttcctttatattttttattttttgattgtgcggaaactattatataatggccttctgtgcattctcctgtgagaaccaggaaaaccaaataacacataccaagatcctacagtggcatgaggcgtgaactctgaactgcctgtctgggacacagcctggtccattgtctgcagagctagggctttctcattgttccctcatgtttctgtactgttcgctgttttacctttagaatgagagttccctctgcatacatgtagaccaactttgtaaaattttgagctatttgtgctatgtcagtggctctcactattgactgctcattagaatacaggaagaagttttaaaaatagccatgatgcctgggctgtggccctagggactctgatttgattggtcttggatggggctgttcttaagcatccagggttcagaccaacggaactaaagcagggcttctcaaattttaatgagcgtgcaaatcacccaagactcttgttaaaatgcagatgctgattcagtaagtctagggtgggacctgagattctgaatttatgataaactcccgagcgatgctactgctgctgacctgtggaacacacattgagtagtaaggagatagaacatttgggtgggtacagataccttttaaggatgggtgaatgttaatgcttgggtgtttggtgatttgaatcatgactccgagagttgagagttctctaggaagtaggaaatttgtagtctaatttggatgatcgaattacagactcagtggggtcttgagtagcaaaacacagccagacctcttcatatgccatcattgccacattaatgatgagtctgtttattcattcatgcattcattcattcatttgttcattcattcattcagtgaatatgtattgaatacctgtcagacaccaggcatcttttcggtgctgagaataaatcaatgacaaagataaatgaggttcttgaccttggctattccagtgaatggagtagaaatagattaactcaactaaataaatatgagtcaacaagagccataccgatggtgatatgtaccatcaatgaaatcaagtacactgtgtttccttaggtggaaggtgtggctacagagtttaatttgctatgtcaatggagcggccaatggaagtttcttggaagaaatgatgttttagttaagacacacacacatacacaaaaccccagggaaagaccattccaggaaaacagaaaagcagggcaaaggccctgaagtaggaaaaagattgatttattggggaacagagaagggatcagtgtagccttggtgtcatgagtgaggagatgagttgtgtggagaggtaggaagggaacgtctcatgcagaggataaggactttgagtgcttttctaagcaccataggaaggcgtctgatggttttacacaaggaagaggaacattctgatttttgtgttaaaatgattactttggctgctatgtggcagatatattagagatgaagatgtcaaaagtggacacagggaaactgcttagtaaactcacagagtaacccaactgaatgatgatgatgcctggtcctagaaaagtggcagtaggaatggatatactttttgtgataacactgacagatagggggatgaggaaaagggaggaagcatgaatgacttctagcaaatgcagaaatagtaatgatttactcacatggggaggatagctgaagatctaatttgtagggtttgacaagaccccagggctccattttagacaagtttgagatgcctgttaaactttcaagtgcggatttaagaatacaatgtatactcgagtctagagcttagggaagaattcaggtctaaaagtaggatttgaggggctattcctatattcatattaaacattaccgtattaaatgagttctcaaggacagagaaaagtagataccaagggaatattggggtttgaagaaaaattggcccaaggttagggaggcaactttggatccttcttgaaatccatcttggctttggattctcagatcttagactcaaggtaaccttgcagagatttcaataataattagtatgtaaactttcagtaaacattatttcccagacatggaacatctggccaaagtcagtgtgatttgaaatgaagtcggctttatctagatgtctctcccagagggacacattgtgaggaaacagatattacattgggtgattatggagggtggggaaataagcttgttggttccttggccagatgtctaagtatatggtaacggagttaatggatgttggggaagaaagacatgtgcagagttggcatcctttcagccaagccaggcaaggttgctgatgaaggacgcctgctgctgccatggagctgaagatatattctcggacccaaggaagaaacacagaggatgcattatcatatggaatgattagttggctaatgagccttgaggggcaggaaaaaatggactataaaacaaattaaaccagtacctgacatcctaatgttctttgtaaacacatgatgatgtcagtgtgtgtgtatgtgcgtgtgtttcctcctgccagcccatgaggttagccaaccccacacaaatactcagaattaggctgaccatctccccattccccaagtctgattcctgggcaggatgccgtgcatgaggaaggtgatttggcttttagagagatcctttccctgtggttgttcttggtagaggatgaaagatgagatttctctgaaaagctcatccctttgaattgtgttcccgaggaaagaggccagatgctatgtgaccaaagctttagaaaactccaggattttgggtgatgagcatgcaatgcctggctgtcttccatctgcagcaagggcagagccagcagggaatggacaacaatacagagaagaaaaggaagcagggggtgagggatgacttgctcacagaccagattatttcatccccaaatggaatggttcagagtgaatgaaatcaccctgatacggagcaggggatgctgatttagctaccatgacagtgccatagccactcttcctgtattgactacttactacgttcagacttgttttaaaggtttttcactcattgactaattccacaccaatcagagcagcatggagggtataccatggctgtgcctattttatgcatgaaaaaaataagtgtttagagagataaagtgattttcttacggtttcacagaccgtaaagcttggactctaggattggaactcaggcagtgacatgtctgcatgttggaggcacattttgctacgttatcaaggaaatactcagttattaaaaagagagaaggaaatgcctcatgggaacaaaggccaggatctaaaatggttttaatttaaaataaatacagccatttgtgttatgtttaatatgtgcgcagcattttacggtaaaattgccatatctgatttgatttaatctatataacagctccatggggtaggtattatgatcctcattgtacatttgttgaagctggctcaggaaggatccttggccagggtcaggcagttcagcttggctgagcgataggatttgagttcagacctttgtctattacacatgcccttcaaatagtattctagtcagatttctttccaattatcagtgcttctgcattatctataatctgggatgtttatttttacttcaagaatctctcataaagactggataccagaaaccttccaaattgtgatttctcctgttctgcccctgaaacttcattatttaatgttcccggtaataataatggacacccatttctggattaaagtacgtgccttttcaaatgatgcatcgtggaaaggttattattaataaaggtagcattaaaacaccacaaataactctgtaaccttgcttgggctcaataaattccctgcagaaaattttatttccagcaaacccttaaaatttagctcgcttttaatatactgtgaccttcagtggcccttatcattcattatatacgagtgacctttccaaagttgagaaggatagttgcaacagcttttggatattaaaacctataagaggtaggtatggttttcgttcattcctactgataattaattcatgtactttaaagacatagcgttattccttttatgacacaggtggtgatggtttcataagggcatggaatataaatggttatcttggctaaagtgggtttctgtcctttttagatgctgagttctagctatagcatgactcagactggggtttcccttggaaggagcaatgtcaagctgttggagacttgatcatcattttgatgatcatccttgtgccattttgacgatcgaccccttacatcttctaacagctttttttttttttttttttttccttttttgagacagtctcactctgtcgcccaggctggagtgcaatggcatgatctcagctcactgcaacctcggctttctggggttcaagtgattctcctgcctcagcctcccaagtagctgggattacaggtgcccaccaccatgcctggctaatttttgtatttttagtagagatggggtttcaccatattggtcaggctggtctcaaactcctgacttcgggtgatccacccacctcagtctcctttaaaaaaaaaattctttattaaataaaacttaaagcatatttaaaagtagagagaatagcctgaagaatcaccttctttgaatcacccagattaaataattatcaaggtattgctaatcttactttacatatgccctggccactctccctctctagtctcatgctactagtcttaagcaaataccagatatcatatcattgttttcttaaatatttcaggttgcatctctaaaggataagaaggtttttttcctaacacctgtaatatctactaacaattaacagtgattttatgaatctcaccactattaaatagtggtttaattttccaattttttcaaaaatgtcattgttttcttatttccaattctaaaaatagtctttatttttttacagcagtttcaggttcagagcaaaattgagcagaaggcactgagaatttgcatttccccttgccccacatttgcatagcttcctcctttaggaacacccttcccagtggtacacttcctatgattgattttatgatagtttgtttatttgaaacaggatccaaataaaggcagtacactgtgattgattgatatatctttaaaaggccattttactctgttaaaaaaaagcttaaaacgtttttttttttttttgagagtggaagtcttgctctgtcgttcaggctggggtacagcggcgtgatctcaaaggctcactgcagcctctgactcctggattcaagcaattctcctccctcagcttcctgagtagctggaactgcaggtgtatgccacgacgcctgactaatttttgtactttttaatagagatggggtttcaccataatggccaggctggtttcaaactcctgacctcaagtgatctgcccaccttggccttccaaagtgctgggattacagctgtgagccaccgtacccagcctgtattaagcatcttttaatcagtctttctcccatatttttgtgtgtttgttttaacatttttctttgtggtgattgttgaccttgttgaagaaaacagattgtttgtcctgcagtatttctcacagtctggtgtttgctgattgcatccctgtggtgtgatttcacatgttcctgtgtcctttgtattcttttaaattagtctaggtcagatgcaagttccatttctttggtcatttcttcttccaagaagaggtacattgatcgattgtctccctttttgtggtgctatttaatctccatgggctaggtattattagctttattctacatgtgatgaagcatccattgaccatggatgctcaatgcatttttcaggggttgcaatttagtgacactgtaattttacccttccttcttcatggagttaccggagtacttcttaaagagaaatttcccagtctactattaggatagtcagggggtatagtttatacaggaaatacaggaaaaatgcttgattttctctttgtgatttcaaatatatgagcttgtttatttgcatactctagtgactggaatttttggttttactacaaatgcagggatggaagttattatctttgttgatgctcagattattcaatcatcaaccggtgagagcttcctccttcctcaagtttctgcagaagtcattttgacatgactctgcttgtctttggtggctttcttactatctagtatgacttgatattctagattcatcttgtatatttgctaccccacacctgaaataatccatttccccgaggagatctgttaggttggtacaaaagtaattgcagttttttcccattaaaagtggtgacaaaactgcaattacttttgcagtaatctaatagttcctaagggtatttcaggatcataacctgggtactagaggtgtcccatgaatcttaaaagagtcttatcatctgttcccccaaaaaccacctcctccagttaccatcatcttgataatcggcctctccatccatcctggtactcaggcaagagagttcagagttttctttctttccttttttttgagacagagtcttgctctgttgcccaggctggagtacagcagcatgatattggcttactgcaacctctgcctcctgggttcaagcgattctcatgcctccaccttacaagtagctggaattacaggtgccttccaccacacccaggtaatttttgtattttttagtagaggcggggtttcgccatgttggccaggttggtcttgaactcctgacctcaagtgatctaggtctcccaaagtgctgagtctctgtcacccagactgctggggtgcaatggcacaatcttggctcatggcaacctctgcctctcaggttcaagcaatgttcctgcctcagcctcccaagtagctgagattacaggctcctgccaccatgcccagctaatttttgtacttttagtagagacagggtttcatcatattagtcaggctgatcttgaacccctgacctcaggtgatccacccaccctggcctcccaaactgctgggattacaggcatgagccaccatacctaaccagcaagttttcttttatttatctttcttccttccagtccatcctttgatttttctttccagttccactgccagagtcagagccctacactccctcacctggaccgacaagtttgacgcctaataaaatggacttctagtcttgctctctctagtccagtccccatcatgccaaacaagcctgttttatgaaaaacaaaacagaacaggaaagcaaaataaaaccaaaactggtcctgccatgcccttgttcagaaatgttctgtggctttctgctccctagagaacaattcaacgctgctccggttcttggtgtccctccgtttccagtcccataacctgcttcttccttccatttccttcatagtagggatttatccctaactcttcttacttcgttcctgctgctcccatgcctgatgtccctgtattcctcttcccccattttgcccaaggtcacgcagaaatttatgccaaggctctcttcagatgattcttttttgtgatgacttccactgaccttggccagaactgcttattcccttgattttatttctttaacgcacagtttgcttagtcaacctctatacgccttggtatcctaatctgtaaagtggggaacataattataataatgcctaggccgggcgcggtggctcacacctgtaatcccagcactttgggaggccgaggcgggcggatcacgaggtcaggagatcgacaccatcctggctaacttggtgaaactctgtctctactaaaaatacaaaaaattagactggcgcggtggcgggcgcctgtagtcccagctactcgggaggctgaggcaggagaatggcgtgaacccgggaggcggagcttgcagtgagccgagatcgcgccactgcactccagcctgggagacagagcgagactccgtctcaaaaaataaataaaataaaatataataataataataataataataataataatattaatgcctatggcctggggttgtgcaggtattagatgagatcgctcaagtaaaatccctaggagtagggttgggctcctttgtgagctcttcataaatattagttcatcatcttactgttgttagcagtaataatgtttgcagtggtaacatttctttacatctctattaatatcaccacatctcagtaattttacctggatcttgcattttctttaaattgggaagtttttcaggggaagggtctcatcttagcaattcttccttttaacacttggggctgagcggtaccttacacacagtgaggcctccgctattatttgcaaatttttgtgccatggatgtagcagaaattatccgagggctcctgatgtaactcctgcccccaatcttgcatcttagctggaaacaataaataacggaataatattgtctggtaccaaagggtgtcccagagcaggaattgcgcagagagcttgatgaagcagaaagaaggaagagtggctaacacaattagtgagtgtctggccctgaagaatggattgtattggacagaggggagaaaggggattgttctaggaggagagagagtgataaggtaagtatagaagtaagaggcagctgtcactgcagtggctgaatgtaaacaaagaaaatcatttagttgaatattagtgagtcaaatcaagaaaattcccatgtaatataacaagttttaggaaatgactattagtcacagttttatctaatggggaaaaatactgtgttgcgtaaatagtcataatcaccactattccagataaagttaaataaataaaacatttttctgcttgtaatctttccctacgtacataagagatcttcaggtcttaaatggcatttccagtgtcttagtctgtgcctcacttgtacaatcttaatgggacccccttaggctgggcacagtggcctgccccatacctataattctagcactttgggaggctgaggcaggaggatcgcttgagcacaggagttcaagaccagcctggccaacatggtgaaaccctgtctctgcaaaaagtgcacaaaaattaagcatggtggcatgtacctgtagttccagctactcaggaggctcaggtgggaggatcgcttgagcccaggaggttgaggttacagtgttggtgccactgtactccagcctgcgcaacagaatgagaccctgtttcaaaaaagaaaaaaagaaattaaatttaaagaaagaaataaatggcaccccttgagtgatggctgtaattgaggaaactgtcagtttgaagcagtggaggaagctaaagttatagtatctttcctaatagggtaaatttttgtttcatattttatttcatcctgctctgcttattaggaaacataatataatatgtttttttggggaggcagggaagaattataataattatggataatatttcaatttatgtaaataatagttcaacataaataatatataagtaatattctaattctgtaattacagcagtgggtggtatgttttgaggttttattaagtatcaaccattgatttaaacacattttgttgaatcccctaagatctccagcgtcaggtttcctgtctttcccacttgacagactaactccggctttgagagtaaatgcgaagtatatcaggtcaaattaagtctcaggtgagatctgtctcctgaaagataaacactgggttgacaccctgaccatgattcatattgggtctatggaggtgcaaactggagaaaaaaatcatgagtttcttcttgttgtcgttggtttagaataagtcactgtaatgaaaatccttcttcaaattttgtgtttctgtatgctgttgaagggaaactcacagatttgcacacatcttcacataagattcatcggtggatgttatgctatattggctactttttttattattattattatttttgagacagagtctcactctgttacctgggctggagtgcagtgacacaatcttggttcactgcaacctctgcctcttgggttcaagtgattctcctgcctcagcctcccaagtagctgggactgcaggtgtgtgccactatgcttggctaattttttgtatttttagtagagacggggtttcaccatgttggccaggattgtcttgatttaatttttagtaaatattgtcaggtgtccaatgcagaatcatgtcatgtgaggctgttcctttgcaggggacttcatgtgagggtagagtgtttcttgtggcatcttttttgggatgcaaaacttatcctacaggtcatttatagtattttggaatgagtaaaggctttttgctgtccaacggaattattaaaaagcacttattatctttctcattaaacgagtcatctgttcttctttcaatgcacttgtgtcaagtgagtatgacatgcaaggatttggagatacagaagtgaacaggcattgctgggcgcggtggctcacacttataatcccagcagttttcaaggctgaggagggaagatcacttgaggtcaggagttctagacccgcctggccaatatggtgagaccccatctctactaaaaatacaaaaattagcgaggtgttgtggtgcgtgcctttaatcccagctattcgggaggctgaggcaggagaatggcatgaacccaggaggcattggttgcagtgagccaagatcgcaccactgcactccagcttgggcaacagagtgagactccgtcaaaaaaaaaaaaaaaaaaaaaaaaggacgacgaattggacaggcacagttcctactctcatggaagtttgcagtctgagaagcgagacaaaaaaaagtgaaatcattgcgataaggaagtgtgaagacttcagaaggagcgatcacccagcacaaagctggagcaagggaatgaccaaagtaagatgagtacagtaaaataaatctaattttagtttattatagaacacttggcaaacacagaaaagtacaaggatgcaaattcctcagaatcccatggttacagtcaccttgagcattttactggatgtttgattttactaatcccctcttgatgagcacttaggttatttctttcctaatatatgaaatatctcctaattttgaaaatgtttcctctgtctactatgtgatagaatttgtttcatttctttgcactcaatgagggttcttggggtgggatagaggggcaaagtgggtagtttgggtggagctaaacaaatctaagtgatgccagtataaacggcgggaaaatatctgtccatagctgcttgtcatttttgtgtcagctccccaaggtgtttgtcagtgtctctaatctccttacactgtggtctcgcctgaggatttgcatattatggacaaagtgaatgtgggggagtgtagggataaagcaaggaaatttgacatttagctgtcaacgatattgtctttcaagtgaggttttggaatctggtaagcaaaagattctaatgagtttgaatgaactgatgagtgtaatacctgttttcctttctcttttcctcgatctctcattctgtctcctccctttcttcccctaccccttttctctttctgctttacccatttgtgtttgaatactggatctttatcaaggtcacattcatatatctcaagcaagggaaaataaaaaccttgtaatttatttatgcatgtaattgcctggcctcattccttttttatttctcctctgcttacttcctaattcctggtgggtctatagctgttaccaggagaggagactggcgtggtcgctgaccaaatcaatgaagatactcctttagagacaaagtttacagttcttagttgtgataagcattatgaaaatctaaatgaaattgtctaggagaggtacattatgaaatcacactcccttttgagtgttaatatggatcaacagtgataaatatttgagacactggttgactggacatgtgatgaagacttaagacttttttttttttttcttttttactctggaagtgagctgcatacagaaagaacaaagacggagtgcagattaataaccaaagtcctgatgtggcaattgattaaactctctttttatgatacctttcctctagagtgaaaagtgagtttgtgttcgtgaatgccctggtgacaagagtctctttttccccgaagaaagagattcacgtatggctgaaatttcccggagaacacaggaggggggggaatattgcaataaatcaagtgagtttttgtgatccctataagcaaaaacatacttcagttatgatggattgtgttagagagtaaattagattgcatggaggctaagtactaatgttgatatttacagtgcttaaatatattgtctgcctcctctaaatgcagctcattcattggctttatgttgtggaggaaatatcagaataatgacctgggttttttttttctgtctttatagtttaatatcatgcaactgtttattaataagctccaaaccccaaaggatccttctaatcctattctaatatcagactaaatttaataagatgcattcttctccccactgcttatgcctcattcattcatttattcaaccaatatttattgagggcttcccaaagtgacaggcctgggttaggctttgggaatacaatgttgaaacacgacaggcttggtctctgccaacaaatggggacagaccaaaagggaaaaagaaaaaaaaagaccaaagacactgagccaagaatgccgccaggcgtttaaggatgtatattgtttctctaatgtaatgacttcgagatttttgggagagatgagagtttagaatgcttgaagatgttggtgtccttggagtgcaaggattatctcctgggataatggaggggaaatttcttgcaattttctcattttgccaagcccccacccctggcactgttgaaattttatgagggtttgctatgggtttttttttttttttttttttttgaggcaaacataactttgttcaggttaccagaagtaggcaaccgctcagttgaattccagattcaggacaagatgtcttgctgatggtgaggtcaaagatgaggggaaatcttcagagagaaagcaagcctgaaggctgcacttcagacaaaggcctgacccgggttcttcacacttgaaaggatggcagagttcaaaggaggcagtgccaaaggagcaaacgcagacacacgggaaggcttgtgaaaagggtttttatttgaagtagagtttttgagcacgtgatggggtcgggggtggaatggagaaatgcaagtaacatgcttctttatcacagaaattctcatcaaagtcatttcctatcagaaatatgagtgtttattggttttcattaatccctgcccctattctctttctagccttcctttcctccttctttccctgccttcctccctcctcttcttcctccctcctctccttcctccctcctctccttcctccctctccttctcagatgtgaatgtgttaaagatccaacctttgctaacttcttgcactggcctagaaccatcttttagaccgtgtcattgtttatgctggtttagatctttaaagatacatctttataaaaagttataacattcttgatgacatcgaagcatttccagaaaatatcgagatccgtcttatatatctgtttattcatccatgcatccaccatccatgtattcatccatctatctacccacccatccacccatccatccacccatccatctacccacccatccacccatccatccacccatccatccatccacccaccatccaccaatccattcactcatccatacattcacccacccatccacccacccatccaccaatccatccacctatccattcactcatccattcattcacccacccacccaccaactaattatttacccatccatccacccacttacccactcatttatttatccatccatccatccatccatccatccatccatccatccatccatccagctatcatgtatacagtaattaaaacagcaccattttgcagagttgcttcactctagctttcttttctgtgaatctggaacaactaactcagactctgtagctggaaaaccaagaaaaatgaatgtgaaagaatgccacatctttgcaaaagcaaacaccaccacatgcactactattaatagactgctttctcttttcatattcttcctgtgacagtcataatttgcatatatagggttaggtttggcagaaaggaaggtagaagaggtgaataattcatctggacttggagtaaaggttttaattttctcttgaattcaagatgtcttttggaaatgaaggtggctctgaaggaagatcaaaacaaaaggtgagcaattctgatttcttccctaagcagtggccattataaaaataaattaaacctggagaactgaacaggagtgcgtggtatctcttgtgcaagagactagaatagggtgatttatatagagatgacctaatcaaaatctctttaatattattgcacgcaatataaacatttatataataatttatactaaagaaaatacatataacatgtatctcatattttgtttcactttaaccttctatttactctgtatatttaaatgtatttttaagtgaaaattagtgttttaaagggaactattcaaagttcattttcgtctatagggaggaatgcatgtgtttaaatgggttctctgagtaaatatatttttgacacttgaggttattcaaactgagcatctctcagttttaggtcttaagtttcttccttcttctatatactttgttttacttttagaagctgaaacagggcctctaccatctgtttatctatttcagccaaattcaccattcagataatgtacatttcacaactgaagcccactcagagatcaattttcaccacttaaagagcatttagccatgattccaggaatagaaaatgtatcctgagacccataatgacttgatgagagaataaaggatcatttgttatgcagcaagtataaaattataacaacatccccctatgtttacagatgaaggacattctggctcaggaagtggggaggattctccaactttctgacataaatgattggatgctgttctttcccactctgtttgttgtcttggaaacaaatataggatacattgtttaaaaaaataggtaactggcatcatttggccctaaaattaggattagggttttttttttttttttttttttttttttttttttttacgtataacaagaatggagaaacatcttgcttactaattggaaggaataagtttgttgctacaacgtactgagttttggctctcaaattctcctcttcttagccacaatttggctcagaggatttgcaccatttgttcatctgtaaaatggtgataataatagcagatactgtctaagtcttacagtgagatttaaatgagttaatagatataaaacacttacagcaatgcctagcacacagtaaatgttctagaagggttagctgtaatttttggttattatactcttaggagaagcttcctacaataaccttatgagacctgctctccttgtcatgcttttggttgacctttcacagagtgtattttcaggttcgacctctacgtcagcagttccatatactttgatgcttgcttcatgctttgcctatggtgttgtaaacaggagttctccacatgcatgtgttgctaagcaacacagaatcctttggctgcaagtaacttcaaaccactcgtactaccttaagacaacaaaatatcctagaaggactcagagctgtttcccaggattcaggggcagagagttcagtcatagaacccaagaggaggaagttcacacagttaccccagaagaactgaaaccaggaagggaacatctacaggagcagagattacactgtttttccagggctgcctggggttggtgtctccttctgtctgtgccattaccttccttttctctctgtagatttctttcccacatatggcacatggacacacggggctgccctgaacccagccctgcctactgcagtgattacaatccatgcattcatttacagttactgaggacagaacctggttggtccagccctgcccaccacactgattacgacccatgcattcatttacacttactgacaacagaacctgattggcccaggtcttttcagaagtcacccctagtccaatctgctggaccagaggagggtcatggttgctaacccacccggcagcagatacaggggtggattctatgagaaggacagggacccactatagcaattgattaatagatctagaaagtagtgtgcgaagttaccaaacatatatgcccaaataactaagctataataagcatgttcatcacttcagaagacacaactacaaccaatgggtgtaagcgacaagtggtcagatttcaagtctcaaagaataaatatctgaaaatagataattttcattatatgtctatataatgttttgttatatatctatattgtatatgtatagtcatcatatatgtatacatctattttcattgtataacatataatggtaatatagtatattgttacaaatatctgaaaatatataatgtaattattaaattatatgattatactatacactatagtatatgtgctatatttactataataaaattaagtatagaaaatgaaaattattttcagaaatttattcttaacaatataaataaatctctatggataaatctatgtacatagatttaagatatactatcatacatagaaaaaaacagtgttttcactttacactcacactcatatagcacagaatacttctgtgaccagatgtgcagggttttccccatcaacaaccagttctccagcagataccaatggggtgtcctataattcagtgccattctgacattatctacctggagatagcatcagatcccacagattaaggattctgccgccaagactgcccccactttggactccagttggaagcctcaggttgtgacctgtgcttctgaaggactggttaggattcccatgtcccttccctgggtttaagttgatcgagtggcttatagaactcaggaaaacactgacgtgcgtttactggtttattataaaggatattacaatggatagagatgaacagccaaacgagatgcatggggctgagcatgtggataggcgtgcagagcttccttgccgtctctgggtgcatcaccttctaggtagccccactagttaagaagctctctgaactgtcctttcaggtttttatggaggcttcattaaataggtttgattgattccatcattggccattggtgatcaactccatctttagcccccctgccctctcaagaggtcaagaggtaggacagaaaattcctaccctctaactagaaggtaggtccccctggcaaccatcccccatcctgaggctatccaagggtcccagccatcagtcatctcattaacatacaaaagatacccttatcactttggagatcccaatggttttagaagctgtgctccaagaaccaggttcagcaaccacatacatatttcttataaatcacaatatcaaattatatatttgtatctatatatgtatatataacatatatatctatagagattgtatatatgtatatatgttacataatatataaatatatataacatatacatatatacatatctatatgtatctatacatagatatatatctatatatgtatatatgtatctatgcatatatagttacatttatatcactatctcaagacatgtatctctttgactatcactgtgtggagatatttactcttaggaattgtctcatgtgcttctaggggcggcaaatatgaaatttgtagggcagattagcaggctggaaattcagatgagagttgatgttgtagtcttgagtctgaaatctgtaggccagctggctggaaactcaggcagaatttctgtgttacagtcttaaggcacaattccttctccagaaaacccatctttgccctgaagaacttcaatggattcagtgaagcccacccatatttttcaaggtaatctccctgacatacagtcagctgtgatgatagatgtcattcacatctgtaaaatactttcacagaaacacgtagatgaatgtttgagcaaacaacgggacaccaccacctagactagttaacacatacgctgaccatcccagcatcctttatcatcttgatgagcttgatcactttggagcagcaagagggaaagaaaactatcaaggcagaggctgccatgatcaccacatgatatgccaacttgctaagacattgagtttcaattgagtctcccaggccaggctaccttcctcatgatgaggggaacagggaaatcaatatgggttcattaacacttaatttaggttttccagtgtggagcatatcaggaagagaaatggcagacatattacttgtctcaagcattatccatcattagcgtctgttctctttctccgacacacacacacacacacacacacacacacacacacacacacccccttatatttttcccctagtaccttcctcactgatcatattgttctgttaacacccaccaccaaaactacatcctgggtcctctccacactgcagctctcaagacgatcgtttactctattatcaagcttaccatttattttattttcaggcggttgtattcattataatgccattagcatgagaagtggggtcctgtcaccagggcaaccaggagcacagagtgcacattccctccttagctgatgtcttgttccctcttgggtggactccaactgtgtctttgattcattccattaggtggtcactgggatgtagatgcttgacagcctccttgtccttaagttgtctgtctttatatcctttactggccaagatttctctctccagaattcattaatttattaccttttatttctgtaagcataacacatataatatttccaagcatatttaaccacatgattatatctttacaattcctataacctctaaccctctaatgtattattttatattacatatcttggtgcatttccctatatattgtacatattgtatgcgagtatgatacattccccttttggtcagtactaccaattaataacaagctccttactactgaaggtatttcagctacatgatcatctgtctaggatattatagagcctattcttgcattatgaaaggggttgaaagagatgacctatacgttctttaaaaatctgaagccctaggtttattccatatctataactgtcctccatgaatataattttagctacagtggatctctctaaatgaagacatctggagcattccaaatgcaagcatgagtgcaaaatgtctgcttgtagttttctataacatccttcctacctccacaaaattacttagaatttgtgaataatttcattaaatttatctttggggggatacttgattaagtagtactccaagtgggcaatgtagtaagcaaatccattcccacattttcttttcacataggcagaatacatacaattttcttttttttattattattatttttttagacggagtgtcgctctgtcaccaggctggagtgcagtggtgcgatctcggctcactgcaacctccgcctcccgggttccagtgattctcctgcctcagcctcccaagtagctgagactacaggtgcatgccaccacacccagctaattttttgtatctttagtagagacggggtttcaccatattagccaggatgtatacacacaattttcagaaggtcttttgtgtgtatgcttttgaataatatgcccctggatcttgcccctccatcaatgatttccaaacctgacattgtatttgaattgcacacacacactaacttggatgtagaaacatttcagatctcaagacatggagaatccgaatcaacaggtcttgagtaagacccagtatctgtaattaaaaattaaaaaaaaaacctccctacgtgactgtttttctatatatttcttttctttctttctttctttttttttctttttcttgagacagggtcttgttctgtcacccaggctagagtataatggtgtgatcctggcttactgcagccttgacctcccgggctcaagtgatcctcccacctcatcccccagagtggctgagactacaggtgtgtgccaccatcaccggctaatttttttttttttttttttctgtagagacaggatcttgctgtgttgccacggctggtctcaaactcctggtctcaagcaatcctcccatcttggcctcccaaagtgctgggattacaggtgtgaaccaccgcacgcggccctatgattcttatggatgcctaggaacactggggatgtctgttttcatacagctggtggtcacagtttcagtgctattgtgtgttcttaggtggtttgcttttcttgctggctttcttcatggtcatagatcatttcaaagcctctgatatatcattgcggtttccactcagtcctctgtctgtttcattcctaattaattactttgacatgcccgtaacctgctcagaaatcactgggggtttcttagcagatacagaaacaaatcttcatccttcaaactggatttcacgaacctccaaagtttcatttctcctcgtctttgagatgtgatataatgtggttagaagacctggctttgaattctgccccttcctctgtagacctactaagttccagacagtgtctctgtatcatctcatgtaatgcttataacagcctcatgggatgaatatccccattttatagatgagaaaacagaggctcacttagctaaaatcacttaaagcctcagtagtccttggggtctggattttgcctccgaggactagggttgtcctcatatgaagtgattgcctgccagtgtcaacagaaggattcctagtcttgataatttggaaagtgcgctaagcatgagatcttgagatatatttccgacttcaacactttaatggtagtattaagaggtataattgctcatgcctgtaatcccagcactttgggaggccgaggagggtggatcatgaggttaggagattgagaccctgctggccaacacggtgaaaccccctctctactaaaaacacaaaaattagctgggtgtggtggcatgtgcctgtagtcccagctacttgggaggctgtggcaggagaattgcttgaactgggggggttggaggttgcagtgatccaagattgtgccactgcactccagcctgactacagagcaagactctgtctcaaaaaaaaaaaaaaaaaaaaaaaaaaaggcataattcagacgtggcagttgagagggtaaatagaaagcactaattaaaaaaaaatccaatttctaagactgcagagcatcagctattattgaaaatgtagacatcagaagggaaaaaccctttgttcagatacagtgctgctaagttagatgcagctgagaaatgggaatacatgcagtaaggtggttatgcagtatttttcaacagtagtccacggttgagcatggatgccatttaaatacattatctggaaaaatgtacatagaacttacgatttttgacagcaggaactcattatgccagaatttggattctcaggatagctgagcagaaagggcaggtggaagtctcccgaaatagatgagtgtttggacaaaaatggcagcaggtatactgtgccaagcattggcctttgcccaggtgccgggtacgatgtcaaggatgcaagctgaagctggccatatggttctcagagtctctctgctcattctgccctccactcagaggtagagacatgggcttttctttatttgcagcagaaggtaattgctttagacttaacaggctgcatttgaccgttgactcaccattatggtgtattatgaaatgaagcctcagccttggtctcccagagtagggggcgggggagggcggcagggagaaagggtggtgcctgaactatcaacacggcacagtttaaatgtcaggctctgcaatttacaagtgatctgagattcatgggaaatgcaatggaaaagtcactgccgagtccctctccctcatgttataagattgagtgtgtcataaattttgtgcattgctaagttcatggtgcttctgtaagaagacattaaaaatagaactccttacgtcctcgattcttacctacagggcatgcaggccaaaagtctacacacagaagttaagctggtttttaatcctgtttttcgttctggggctgtactcttaaaagccaaacactttttcagagacattctgtgcccgatatagcttcattttgttaatagcagaagtgaatagaggcaaaaacaaaccaaccaaacaaacaaacaaacaaacaaacaccctgaaaatacaagcgaatgcctggataggaattcaaagtttcattgaaaataagatagaaataaatcactaaccgtacttgtcttacctgtgtgatgtggatattacataacttaatattaggtagaatatccaaactattttgatgaaatatgttgggagagagagattttttgtttcatcagagagaagttttgcttttccatgaaggtacagcctcagcttccctagagaaatctttctccatagaaggaattatctgcaaagggtgggttgctgagggctaaatccattaaaaccaatttgaggaagagctgttacttgctgaggatgggaaaaaaatatataaaaagctcattacctagagcaaaatgattgctttaggattaagaaattgacagttactgtttaattataccagcccactgaaaactcacagactaagctttctagacacttaagcatatgtgcatttgttattgtagcaattggggtaaatttatgatcataaatgccaataacttgaacagtatccaactagcctttgtgtgaataggtttattgtgttcattttacagggaaaacacagtctttctatcaatatgaccaagatttcctcgattttcttttattctcagagttctgtttaattgcctgcaatctttttgatattaggctcttcattcatttttttgtccattagtagtttcactaaggaaacatggttctgtagggatgcgaggctgtgtttcttatacgtctgctcccctttgggtctgagatcatacatacctggcttgtggtccagtgcaagctccctggcagcttgggaaatgcgtcttcagcagacttcagccttactttgttttcaggaatgtggcaggccaggtcgcactaacacagccttctgtaacaactgtctcagtgctgactgagtagttaaggtaaatattaaaagctgagagagccagtgcctttatacaaaggctggagtgtatcaaaagcctacctagagttgtgcctaggcctttcctgggccttgaagcatgacaaaataatgaaggaattcttaataggaaccgtttggggttaaacaagttttattggggttgtgaagatactccccaggtatccacaaacaagtttattcggggtttgaagggactccccaaacctccatgatttagcaggagacaagataaggataatcatcccagcacctggacccatttagattaagtaaatttactgaggctgcagaggaaggtcttcaggactcagatcttatagatgagaagttaatcacttacgtctttagaggaatgcacacttacaggtagacatatagcttagaagctgtataagctctggaaaactttctaattttaagttggtctggtgatatttcccaggccttctccctgtacccggttacaggaataaactcccttgtctcccagttcacctgcatcttattttggggcagtgagaataagcattccgacactcagtttggcccgggaacaggagggcaagacagcttttcttttgtttattgctttgttgcctgctacaaagtaggcgtttaataaacatatttataaaaaaaagaatgaaggaagggagaaaggaagggaaggagagaaggaagaaaggaagcagaaagagaggaaggaaggagcgagggaagagaaaaagaagggagaggccgggcacggcggctgacgcatgtaatcccagcactttgggaggccgaggcggatggatcacctgaggtcgggagttggagaccagcctgaccaatatggagaaaccccgtttctaccaaaaatacaaaattagctgggcgtaggggcacatacctgtaattccaactactcgggaggctgaggcaggagaatcacttgaacctggaaggcggaggttgcagtgagccgagattgtgccagtgcactccagcctgggcaacaagagcgaaactctgcctcaaaaaaaaaaaaaaaaaagggaggggataaagggggagagggagagaagaaccaccctactaagttgaagaaagctgagtcctgccttccccatgtcatgccaacagattgtgtctcttaaaagagataaacaagattaattttggcattctttattcaaaaggacctttagactcttctttctggagaatttcaaggtcatataaaccttccgcaaacttagttattttaggaagtaacagaacatttcactgcaataatgaagtggttataatcttacattaagtaactaagtagaagaaaattggctgggtgaggtggctcgcacctgtaatcccaacactttgggaggctgaggtgggcagatcacttgagttcaggagtttgagaccagcctggccaacatggtgaaaccccatctctactaaaaatgcaataattaggcgagtgtagtggtgcatgcctgtaatcccagctattcgggaggctgaggcaggagaatcacttgaacccaggaggcagaaattgcagtgagccgagatccaaccgctgcactccagcctgggtgacagagggagattctgtctcaacaaataaacaatccccccaaaaccaaacaaaaagtaactaagtagagtaaaatctactttcataattcaaattccatagaatggttttgtttttctttaaattctattgttttagaaaactatacattttttaaagtgtgatttgactagtaataatatgagaactttgtacaactaaacttttcagaaacaaagctgttgtacaaagatatgccatcatccctggggagattttgagtaaatattctgtatgtggctcccccaaagtatctaaattcatcctaaaaataatttcagggaagacgtcatgggagttaataattagggttgttattagctcttagcgttgagcattttaaaaatccagtgagtgcctgcattatttcatacacttcagattatctgccttttgcaaacacagctgaatgtagttcatcaaatttgggtatttataaagataagcatagcccaaactttcgtggttgctagggcacactcaaatatcccatttcaatgaagtctgacaagaagtcactcttgtttttagattagctctggtcacagaaagtaacacagaatgatacaaaacagcccgaagaagcagctggctatggagaggcaaattcataggtgcctttttttccttgttaaactgagtaatcaaagtttagcttttctaaaaaaaaaattcctggaaacatttgctcatatgctgtataacacaattttgaccctttatcattgcaattcataataaatgtattttttgtcctctagtttccccaagaagttagctcctaggtaataaaattatacacacacacgctcgccccccccacacacacatttgcactaaacttctttacaaagaatcatttgacagtagccgtataatttaatgtttttcatctaatgctcagaatgaagcacaatatcaaattatttttgaggttttcatcttgttcctctgattttgattagtgagcattttctataccctagtcactaaattgaaagggatcaccaaattttatacatgctaaatggaaattggctgggtgcggtggttcatgcctgtaaccccagcactttgggaggctgaggctggcagattgcctgagcacaggagttttctaccagcctgggtaacatggtgaaacctcatctctacaaaaatacaaaaattagcgggacgtgtggcacatgcctgtaggaccagctgcttgggaggctgagatgggaggatcgtttgagcccaggaggttgaggctgtactgagctgagattgcaccattgcactccagcctggatgacagagtgagaccctgtctccaaaaccaacaggaaacaaacaaagaaacggtaatgtaaccttgacatgtaaagggcagaaaagaatttttacaaaagatattttattttaaataaaaatgggtactaggtcgaatacttgggtgacaagataatctgtacaacaaaccccaataacatgagtttaccgatataacaaacctgcatgtgtagtcctgaacttaaaaaaactgttttaaaaattaatgcttcatttggtaaatcaaccaagatagctgcaaattagtctagagtgaaaaattgataaacttaaaaatcgattaacacattttaagggcataatatgatattgttgactataagcactacgttgtacagtagatctctagaactaattcatttcacacagtgtaacttcaagctaattgaacaaccaccgattgtcccctccccgtggctcctggttaccaccattctcccctcagcttctatgagcttgtctattgcagacactttgtataagtagaatcatgcaatgtttatccttctgtgactggcttatttcactagaataatgtcctccaggttcataaatgtacaaatgtcaggatttccttcttctttaaggctgaataatattccattgtatgtatacacgacattttcttcattcatttgttttagtcagttctcacattgctaataaagacatacccaagactgggtaacttacaaaggaaaagaggtttatagactcacagctccacagggctggggagacctcacaatcatggctgaaggtgaaggaggagcacaggcacatcttacatggctgcaggcaagagagcttgttcaggggaactgccctttataacatcatcatctcatgagtcttattcactatcagagaacagcatggggtaaaacccacccccccatgatccaattacctcccactgcgtccctcccaatacatgtgggcataatgggagctccaatttaaggtgaaatttaggtggggacacagccaaaccatatcactgttcatctgtcattggacacttaggtggcttccatattttggctattgtgcttaatgctgcaaaaaaacataggagtgcagatatttctttgctatcatgacttcatttctttgtatatgtacccagaagtcggattgctggatcacctggtaatcacatttttaaatttttttttgagaaacatttatactctttttccatagtggctacatatctacattctattcagcaatggcaaaagggttccagtttttccacttccaggccaacaattgttttttttttttaatttttcatttttttgataataggcattgtaacaggtatggggtggtatttcattttggttttgatttgcatttccctatgtttagtgagctgtattatgggcttaaaatttgctaagatttccctttgttaagtgttcttaaccacctccatgttaagatctcatagtaaatgttcttaaacaccctctaccccactccacatgtccaaataaagggaaatttttggatgtgaaagataggtctgttcctatgattgtggggatggtttcacaggcctatgcttatgcccaagctcatcaaattgtatacgttaaatatgtgcagtattttgtgtgtcaattatacctccataaaaccataaaaatctataatattcttatgtgaaaggctagtgtatttatggacatatctcagacacattttgtgactagttatgatgagtcagaatttgcatctaatgaatttctttaccagtgttgtaaattctcagaattagttacataccctaatatctaatgggggttggccacaagttgataactaagccttcatcccttaatatcatctactccactgacttccagggctgagatgaactactcacagcatgcatatttaagacaaaaatgactctgatgagcaggtattaggttggtgtaaaaggaattgaggtttttgccaaatatttttgcaccaacctaataaaattctctcttgtatctgggatgggtcatgggccccagagacactgtaggtacttctatctcttaactttgaattagttcaatctaatgtggcatttgggaactgaaaaaccaaggaagttcattactgctattattattttttccaagtgtatgctaataggaaaaactgcttagcccaaaatacgtgtagcatgttgaattagctgaagcatttcccccgtgtttgctttagaacgtaatacacttccgttttggaagtaaaatgacaaatttttggtgcacaaacatgttaaaggctattacagaaaatatttagaatgcataatcttcctggattcctattttattgtaagtgtataaattttaatagagtttttatattagttgttcctcccaactaattatttttaaattgctggaatgttttgaagcagaaccataaaaggtatatattttttttatttgatagggctctttcaactgcaggtgatagaaaagcaattcagcaaggttaaatgaaatagaaattggtggagggcctggaggtgttacactatgggtactggcttaaggcacagcatgatccaggagctcacatcagtgtagtgaaggttcttttctttttctgagacagagtctcactctgtcgcccagagtggagtgcaggggtgcaatctcagctcactgcaagctccacctcctgggtccctgccattctcctgcctcagcctcccgagtagctgggactataggcgcccgccaccacgcctggctaattttttgtagttttagtagagacaggatttcaccatgttagccatcatggtcttgaccttctgaccttgtgatccgcccgcctcagcctaccaaagtgctgggattacaggcatgagccacagcgcccggccatcaagcttctttctctctccccctctctgtttcttgcacagctgtacagactttttgtatgtagtaagcatgtttacctgtgactagtaattccagcacaaacatttcacccccttatagctctgcagatattttctggaatgactggagatggcctgtcttcagtcatgatccatccctgaaccaatcatgataaaatctctttggttggttctaccacatgcattaatttctgctagagcatgggggtcctgtgaaggaaccaaatatctatgatgcttgttaaagacagaatgaaagactttactcaagagggactatcgtgataggtgaaatggggtcttgcagtgggggagaaagattgggctcaattctgaacgcaacaaccaaaagtggtgatttatagccaggaagtcaagtgagggtcagtggatggagacagcagaggtaagggaggattctgagtaaatgaactaacaaggttcttgctaacactggacaatgcagaggcagcacagaagctcaagcgtcaggcctcacggggaaaaggattcagatgagtctgaaatatgctgagtttggtggcttacgtctgtaatttcagtgactcagaaggctgaggtggtaggactgcttgaggccaggactttgagaccagcctaggcaacatagcaagacaccatctctaaaaaagataattaaaaaaaataaaagaagggtctgattggagtctggttaaggagaaaatctttgtcagtgcccaccctgaatatctggaacacgaacctccagaacagagagggggttctttcactagagaagctggatggtcaataataaagaatatccctgcttctggtgctcccatttatcacatgcagggaatgaaatttgcagaagtgacatgacttgaacaacgtcagacacgaagcatggaggtgaaattaaccaaaaggttgaagttaaaatgagtactttgcaatgccattaccgatgcataaactttgatgagctttgagaaataagatcaccacattttcatctacttttccagggaggtggaaaataaatagagaaatactcatttattcatctgtttaacaaacatccattgatattctttatgtgctaggtgctgtgataaacactacagaaatagcagagaacaatacagagaaaaagccatgtcttatgaatcttacattcttatacaccatcagaataaaatactgctttagaaaatatactgtgtaccttataataatagaacacaatctgttgtttctgagatgtgaaaagtcaattgtaagatttacgccatagaacaaagatgtaattcttgttacacatacacacacacaaagacacacatttaatcagggcataaatcaagatttttgtgatattaatccagtgcattcaatacagagttggataatctgttgctatttcaaatgtagttcctccctccttaaaatgattaaatcaaagtcccagaaggaacttggggaacttctaatcggtctccatgtcgtggacaaaaattaactgaattaactgtaactatctcaaatcaagacacacaataataaccactgtttattctgtgcctgccagtcactgtgcagataatttattgtgcactgtctcatttaatgcttgtggcaacctaatgaggcaggtacatttgattattagtcccattttacagtagatgaaacagaggcttatcttctgtaaagaaaattgctcttaaaacacagctcttggccgggcgtggtggctcacgcctgtaatgtcagcactttgggaggctgaggagggctaatcacctgagtttgggggttcaaaaccagcctgaccaacatggagaaatcccatctctaataaaaatacaaaattagccaggtgtggtggtgcatgctctatcatcccagctactcgggaggctgaggcaggagaattgcttgaacccgggaggcggaagttgcagtgagccgagattgtgccattccactccagcctgggcaacaagagcaaaactctgtctcaaaaaaaaaaaacaacaaacgcacaaacacacgcgcacacacacacatacacacacacacaccccacctctttgggttacatatgctttttaactgtttgaccttcggtaggtcagtaggttagcgagtgcccatgcagtgtttgcctgagcttttgcatcagccttgcctgtttttttgttttttgagttagggtcttgctctgtcacccaggctggaggacagtggtgcgatcatagctcactgcagcctcgatctcctggcctcaagtgatcctcccacctctgcctcccagtcttgccttttaagagccttaggactcttaacctgggaaatctataaaattttttgttatgtataaggaagaacacaacttttcttctgtgagtactgcttcaaagacacagagtccaatgtacataggcaggtggatagacaagctcgctgtcaaacttgttacatagatgaaatgggacagatggggtcattcatctaaagggttcttggtaaaggtacaaaaagcaaaaccatgaggccaaaaacgggagcagaaacagttggcactcagtgagtaggctccaaagctctggctcaaggtgggaacatggaagccaatggtcaagtttgttgcacagtgcacttaataagatgaacagcagtgctagaatctggaggatcatcatccctggagcttgacagccaatatctagcctgcttgagagtgcagatgaagcgctcggcaaatgtagttttatttacagcttcgtaagcctagatgggtaatcctctgtggtgtcctttagagggaaacgtaaaatggggatgacgactttaaataccttccagagttagatggcttttagacaccaaagttcagcctcttgcaacatattgcatttcagcccctgccacggttctctgctgacatttcagagatgggcagacaccatggcattgcagttgacatggcagcttggccaggtaggagctcacatatggagcatttcttgctttaggtgttaaaaaacaagtcatatctttaaaaggtcaccgtggtttgtactaactatatgactattgaaaggcacagtttggggcaagcctgtttattatttttcaaattagagaagtgatattgcgtcactgctgcgaaccaggaagggagaatgagaaagaaaatcacccatgaccaccaccatccctcttggaattgtgtcgtgctctctagcctccttcctttaagatgatggtttctatggaaaattgctcttaaaacaaacctccttaagttatatatactttgcaactacatggtcttcggtaggtcaaaaagtgcccatgcacttttcccctgcgctcttgcgtcaaccttgccttcttttatttttacttatttatttatttatttattcatttatgtatttatttattttttgagtttgggtcttgctctgtcacccaggctggagtacagtggtgcagtcatagctcactgcagcctcgacctcctggcctcaagtgacctcccacctctgcctcttagagcttttgggagcttgcatgatatgacggttgtgactaatgttaggaacatccaaggagtagacattggaaggactcctctcatgccaccatgagctgttgcccccaggaaatgagtgaagtctcagtaaaatggagagaactttaattcccgggtagatgtatctgaatctgagactgaacattttgttggtaacacaccagttatcaggagtgtcttgatcatgctcatctttgtctaatctttagatttctcatctttccggggaggttaagagttgctgtgtcctttctcagtcccaccacttgaacatgtggtaacatgtatgaggaaatgctttgtacataacaaatcatgtgaaagtaaaggattgtcgtcatttttgccattgctattaatattattacacagggtttctagtatattatgttggttaagagcaagcctctagagcaagcttctccagcccatgtcccccacagggtgcatgtggcccgggacggctttgaatgttgtccaacaataattcataaattttcttacaaccttatgagacgtttttgggggatttttttttttagctcatcagctgtcattagtattaatgtattttatgtatgacctgagacacttcttcttccgccgtggctcagggaagccaaaagactggacacccctgttctagagccagtcctaactctactcatttctacctagctgtgtgaccttgggcaagttagttaacctctctgatcattggcttctcctttagatgctgctgcatttttacctctctcataagattgctgtgaggaggctgagacaaggcagggcatcgtgcttgcagcaacaccctgcacgtagcaagggtaccacaaatggtagctatcaatgttgttatttgatgatccagaatatgtattgcttttgtcatcctttccctagtctttcatcattctggattttccatgtctttaagtttgttgctgtcttagaattagtagattttcatggttctaagactctatctgaaaactgtgcatggtggatcttgttaatgtggtaaaaatgtcatctgtcacagcatcccagttcatgatttaatttatccttccacagatagcctttattatattagcttgtagtgtatatttaatgaactagtgtaaaagtcatttttctctggctgggtgcagtggcttacagttgtaatcccagcactttgggaggctgaggcaggcagatcacttgaggtcaggagttcaagactaacctgaccaacatggtgaaacctcatctctactgaaaataaagaaaattaccagccgcattacatgcctgtaatcccagctattcgggaggctgaggcaggataattgcttgaactggggaggtggaggttgtagtgagccaagattgtgccactgcactgcagcctggacaacaaagcgagactctgtctcaaaataaaaaataaaataaatagggagatagggtcttgctctgtttgccaggttggagtgtggcagtatgaatatggctcactgcagccttgacctcctggcctcaagtgatcttcctacttcagcctcctgagtagctgggaccacatgtgtgtgccaccatgcctggctatttatttttatttgttttttactttttgtagagatgaggtcttgctgtgttgtccaggctggtctcaaactcctgggctcaactgatccaccagcctcccaaaataagctaccactcctggctgtaaaagtccttttgaaatggtacaggagttcaagaccagcctggacaacacagggagaccccgtttctacaaaaaaataaataagttagccaggtgtgatggcacacacttgtgatcctagctactcagaaggctgagatgggaggatggcctgggctgagcagttgcaggctcgttggagctgtgattgtgttactgcactccagcctgggcaacaaagcaagaccctgtctcaagcaaaaaagaaaaagcctttttcttgtaatttttaaataattccttccaatacaaaataataagtgtctagtccattgagaattaatttagaatgctcatgtgtcttggattgactttcaaaaccctgattcttaaaccatttgtgattgaggcttacaaccatgtaacaatcctcctaagttctgggagtgaatttaagtctggtaatgctattaaggaaagagagaagagtatgttttctaatgtacagtggatatcttgaagggagccatgcaggcatatttccaccttggtgtgtacttgatggggagaggcaaggagagagcgtggcaggttcagggtttgccatcccaatcttcccttggcgctgatccgtggtttccttcctgatcccacagaataagcaatgttgatctcgtgtggatcatctgttatgtaaaggtggttaataccaccattttctgcttcacatgaatcagagaacctgggtatctctgaccttcagggttccagctctcacctaagttcagccagtgtgtgaatcctctattgacctactgggaccacttggtagattgaccacagctcctgttatgcaccaagcattggcctgtgtgctcttgccagcaaaacaggtgtgatcctcagggagcctcaagtctggagggggaggcaaacattgattgaagaaacttacaatgaatgcataattaagatagggatatttactgcaaaggaaaaataaaaagattctttacatcaaatgacacatagcaccaacttgggctgagttggaagtgactcgtttatgaacaggggtatatatttttaaaagatgtactcttctctgaatgaataatttattaaatatgaaaagcaagagaaatactattaaaagaatgccacatttttagggaaagtgttgttgagggttcgaaacagacttttggtaaccggccaattccacaggctggtgccacattttcagtgccctttgatgtgtgtacgtgaaaaagctgcttgttttcctgtttaatatcaatctattaattttaaagtatttgaagagaaaatcaaagacatagtctgcatttggaaacacccagaaccacaaatctaaatcctagtaccaccaatttgaagactgtttgtcatggcttgaagcctcctgagaggggaattttatttacttgacggagtcatgtgaggttgattggtctaataaaactggattttaaatgaatgtggagcatggtgtccctttgccctgggtatttaaaaatagaccaatgatttctcatagggcgtctttcagatacactttagcagactgatgaaggctgttcccgggacacatttaaatctgaaacaaaatgagagtttaacaaggtgtgttggttcaggttaaaagcgcctacccctttcagctcagccaagatcatctctcattggacaaggttcccccaagactggctgggctcgtcccctgggtgctgaaatgattagtataacattccggagttcaggtctctgttatcttgtttctctgtcggatgcctgggaatgtgaatttgcctacacattttgagacatttttacactaggatgcttctgagctgaagatgaaggtggttggttttcttcctcctcttccccttttcaatattgtagggaccaagtggtttgttgctctctgctgccccctgttgctcatgaatgggaacagctggttttccactgaaggtgattcttaaccattacaaagagcttcccgtgaggttgaacctggggttcctagcttcatgtgaggttggctgattttatttatttatttatttttgaaactgacttttaaatgaaagttgagctaaatggggaagaaggtatctagcaatagcagaagtcccaaggttaatggaatacccaaagaacaaagtgaacagccgtgtgcctctctttccattgttggtagattccagctacctgcagctacgcttggtttcttgagagtcctagtccttgtaattgagccctggagttaagtccatttgaacaaacatcctcctagtcccaatttattccaggtcctgcatgagtggctgggattttcaggaaggagggattatagtcacatggtgtgtggttaatattttgagtgtggagtcaaagcatagttttgaatatgagcttcaactgttttcaaccgtatggctctgagccttggtgtctgtgtctgtataatgaggattttggtggtacctgattcagaggttgttgtgggaaccaatgagaaatttaaacaacttatgatttgttggtcacttaccaataccagtgcttttttttttttttttttttttgagatggatccttactctgtcacccaggctggagtgtagtggtgcaatctcggctcattgcaacctctgcctcccagattcaagcgattctcctgcctcagcctcccaagtagctgggattacatgtgcctgtcaccacacctggctaattttttttttttttttttttttttttttggatttttagtagtcatggggtctcaccaggctgatcttgaactcctgacctcagagtgctgggattacaggtttgagccaccgtgcccagcctccagtgcattttaggcactatgcttttattagctttttaatcctcagtaggacagcaaagatgcttgtcttttccctttcaaatagggctaagggctaacagcccttagcagaccttctctttatccccttgaccaggtttgtatcacatgcctgtgcctaaaccaaatgctggcaatagggacggaatgataagctttgctttgattagttagaatgattcccaaggaagggacaatgttctctgagcacacagagaatgatcactcaaatagaactagggctgaggcaggaagagagaataccctgaggatatcagtttggcttgtaactagcagggcctaccttacatagctgcaagatgatgcacttggacccaatagcccagatcccacgggtgtcataggaagtgcttatcacggagcctagcccatagcacccctgctctacagactcacccaatcactgctctcaagagggtcgtgctgtaatggggaagactgatccatcagcaaatttttgtttgtgtgtttgtttgtttgtttgttttttagatggagtcttgctctgtcacccaggctggagtgcagtggcatgatctcggctcactgcaacctcctcctcccaggttcaagcgattctcctgcctcagcgtcctgagtagctgggaccagaggcatgcactaccttgcccagctaagtttttgtatttttagtggagatggggtttcaccatgatggccaagctggttttgaactcctgacctgaagtgatctgcccgcctcggcctcccaaagttctaggattacaggcgtgagctattgctcccagcccaaatgtttttatactaaggtggaacatgctttattagctgtagtcacagacatttatggagactcagaagatccctcatatttaaaacatgtgttcctagatatgctgttgaagtttatttctttcaactgcatatcattacttgctttcatgctctctttggtccatttttggttttggttttggtttttgagatagggtcttgctttcttgcccaggctggagggcagtggcacagtcacagctcactgcagcctcaacctcttgggctcagatgatcctccagcctcagcctcccaagtagcttggaccacagacgtgcgccaccacgcccagctaattttttaattatttgtagacacggggtctcactgtgttgcccaggctggactcaaactcccaggctcatgcgatcctcctaccttggcctcccaaagtgctgagattataagtgtgagccaccagacctggccccccttctttggtctcaatccctcaactccaatatagcccttttcacccaccttcccatcttctctaaccccgggggacactggcaatctttaagcagaagaattggctgcctgaaagcctgtagatttatttggaggatgggtcaagaagaagtctcccaaaggagcttgggggaattctccttttgattttgttattcaaaaatgatgtcaaattttagaaaatgagagaaaatttagtagagtataacggttaaagagtctcaactttgctactcaacactttttgaccctgagcaacttgcacttaggggcctgagcttttcaatctgtaaatacggccaataataatacctccctcttagggcactctgagcagtcattgagagagcacgtgtaaagtgtttttgcacagtgcccagaaatttgcagtatttaatggtccttcctccttatttatttttattacttgtttttgtttttttgagacagtgtcttgctctgtcgcccaggctggagagcagtgatattatcgtgactcacggcagcctcgacctcccagactcaggtgatcccttcacctcagcctcccaggcagctgggaccatagctatgaacaaacacgtccagctatgttttgtattttttgtgaagacggagtctcaccatgttgcccaggctgatctccaactcccaggctgaagcaattcctcagcctctgcctcccaaaatgttgagattgcagacaaaaaccactgcacctggccccttcctcattctttttgaagtattttagctttcaaaaggtcaaggaccctttataacggtttgctagtttagaaagaaaaaaaaacagtgacatggtgaaaaagtaagcctgctctctctctcgttttctatgatgctctatcgggattccttggttaggagataaggtcaggcattctagggtattcagagggcccacctcttcatggggaagcccaggcttgcttgttcttatgttttgcaggacaaacgtcttagaactccacagatggggagtctgagaccctgagtgattaagtaattttgaccttgagctatctatttgacttgaagtggctaatggccagataagtgctctgagatgatatctcagtttctgctatttttcttgtgaggaaaaggaaaaaaagagcttgatagtgatcagagttcatttgcagaagtggtttccttttccccaatcaacttgtgagaattcacttctgtcctcagcgtgcgtgcttcattcattcactcatccaaagctgtctcaggcagagtgctggggactgggtgagggcggggagtctttccttcaggggcttatttctgctactgtgcatgttcttcctccacaacttgcagatccagacctctcctcctggcaagactttctcatttctttcacgtgacttttggttagaaacattggcctgactttgaggcttacacccagctttctttgtttgtgttttgttttgtttttgagacgcggtttcgctcttgttgcccaggctgaagtgcagtggtacgatcttggctcactgcaacctctgcctagcgggttcaagcgattctcctgcctcagcctcccgagtagctgggagtacaggtatgcgccgctatgcccagctaattttgtatttttatagagagggggtttcaccatgttgatctggctggtctcgaactcccgacttcaggtgatctgcccgcctcggcctcccggtgttgggattacaggcgtgagccactgtgcccgaccctcacacccaggtttttaggatacccttggttctatgcccctgatgacctgaaggcaggcaggagaagtagcagtgtgtgtttgtgtgtgtgtgtgtgtgtctgtgtgtgtgcatgcgcgcacgcacatgcacgtaaggggatgatgcagcccgtggcgcttaaattctaccctccccaagagttgggtcccttcaccaaacattaattttttccgaactccatcttatctctgtaaaatagaagtgctgattctttttttttgtttaagttctgggatacatgtgccaaacatgcaggtttgttacataggtaaacgtgtgctgtggtggtttgctgcacctattaacccgtcacctaggcattaagccccacatgcattagccatttatcctgatgctctctcttcccccagccccctacagaccccactgtgtgatgttcccctccctgtgtccatgtcttctcattgttcagctactacttatgagtgagaacatgtggtgtttggttttctgttcctgtattagttttctgaggacggtggctcccagcttcatccatgtccttgcaaaggacgtgatttcattcctttttatggctgcatagtattccatggtgtataggtaccacttacctagtaatagacaagcacatgcattgggtttgaattttgcaagtgagttgttggaagggaacccctagatgtcatttgcatgctaagtgctttccccgactgtgttatttgctgttcacccagccccgtgcattccatctctcacatttttcatgcgagtgttctgctgcccaaagttactctgtatagtgtttaatccactctgagtcagttctgcagagcagtcggtggtaaagtcctttcaccagcactgtctgagagttcctgtgacaacagcatccccgttcattgaggcctgagtgttcttttagattcctgcttaaacataaaccagcagtgaacgaagaatctttagtacctgacgtgaaatggagcccaagtctatactgctgactgggctgggggcgcatgcttggttggggttcattatatctgaactcatatcagggagatgatttactgtttctcaataaaagatggagttttgaagaataccttcttttgtgtgggatggaaacatgtggctaagcctattgcatcaccttgtacaaaagagatattcagcaggtatttattaagctaaactgaatcatgctcaaagacgctcctcttccctaagcaccattcagttgaatgtaacatgaaagagacaatgcatcatgttcattctggtttagggtctttccttgttgaaggctttctgctgtttagagaaagaccaagtatagcagccagaaaaacacagagctggcaactgagtcacaaagctgtagcaacacatcactcaagaggaacccttctcacaatgggtagatatacattgagtggtgatgtggagtgagacggattgatatccacaatgtcccaaaaggaaaagagacaaatttgacagtaatccaatttccgtcagcaaatttagatgatgagatgaaaagttagatttatgaggatagattcattctcactaggtattatgacgttagaacgcctgccaggtgaaaagtggcacatttttaggggaatttaggtccaacgaaaaggtgtttccttaggcagaaattgaaacatgatctgtctgtccagagttttgtgccttcgagcacacatgtgcatgcaagcttttaattaaccaagaagttcttctttaacgtttatatatatatatatgtatatgtatctacagaaataggataaaaagaagttcagaattcaactgtgattccaatatccatagataactattgctaacactttctagccttttttctctatgtgtatacacatatttggaaatttggaatcactgtaacctgctttgtcttaagatagcatgagaatttcttcatgctataaatgtccttccgaagtgtaatactttaaataactatatactgttccattgtatggatgcagcataggaaactcattccccttggctggatatttatcttactttttttttttttttgagatggagtcttgctctttcaccaggctgggtgccgtggcgtgatctcggctcactgcaccctgtgtctcctgggttcaagcaattctcctgcctcagcctcccaagaagctggggctataggcgagcaccaccacacccagttaatttttgtacttttagtagagatggggtttccccatggtggccagaatggtctcgatctcttgaccttgtgatccacctgcctcggcctcccaaaatgctgggattacaggcgtcagccaccacacccagccttatcttatttcttgtataaaaactcctgcgtgtgtgtgtttgtgtgtgtgtgtaaaacttttattctaatcaagcatattttcacaatttctacagcagccacaacaaactttctacaaggtgaattttagagagaagaggttcaccgtctcgttatttcaacctcatcatctgtaacggtggccatagaacctattctgatttactctaccagaaaacttaccctcttagttactttttttctttcattttttttttctcagctgtattgcctcagttggatcatatctgtttttcctcaggaatgtttctgaaactatgaacaatatggaacatgttgtcaataagggtattttcacagatgcgtttttgtcacacagtgtttattgccagagaagtatgattagtcatgttctctgatgtgatttagtaattgtcatttgtctattattaggtgaaattttctagctgaatttttccaaagatgaataaacaaattaatcattcactttcctatccaccattcaaccatccatgcatcctccctcccttccttcctcccccttccctttccttttctccttccttccttccttctgcatttattaaataccaactctgtgttaggcagtatgttgcatgccaaagacaaatgtataaactagatagaatggtggaatgctttccttctgagcactcacattttaatgctgggaattttatgctgaggttcagtgcttttcagggagccatgaaccccctgcaatgacttgcagactgtaggtattacatgtaaaacttgtgtgagtaatttcctgaagaaggggtttcattcttcagatcctcaaaaagatctatgatccggccaggcgcggtggctcatgcctgtaatcccagcactttgggagaccaaggcgggcatatcaggaggtcaggagatcaataccatcctcgctaacacagtgaaatcccatctctactaaaaatacaaaaaattagctgggtgtggtggcgcatgcctgtaatcccagctactcgagaggccgaggcaggacaacagcttgaacccaggaggcggaggttgcagtgagccaacagagtgaaactctgtctcaaaaaaaaaaaaaatatatatatatatatatgatcctaaaaagacattgatattaaagagtaatgatggggaaggaccaccaagtgatcatttataagatgctgcgagaattgctaaagttgagggatggattctgcattccaggagaacaaaggaggtagatcccgattaactgagtagcaggatattgagggaagcttcttgtaatgattcagctgagtcttacacaatgaatgagacttggatagatgaacatgcattaggagacatcagttctggtcagaggaaacagcaaatgcaaaggcccagagccataagagattcagatgcactaaagaaatatcccatcatttaggatggtcggcatatacacagagggcctataaggaaggagaagaaactgaggttgtagaagctggtagggactgcatgctgaaaggcattgtaaatcttagactaaaatctgtgggagactttgaacaacctaaagattttaagcagagtgatgcaatgcatttgtcttttgaatgcaaatattgctggggcgggtcttttgtgttatcagctaatgatttagttggtggttacctgagtacggggtcaggtgtatgttcttagctggtggaggccttggggatgtagaagcacaaacgggtaagtcactggaaaggtaggtgaaagattggccaatattagaggtgggtgtttatagaaatgaatgacaatgaccactgagtagttcctaagacaccatcgctttgcataaatcatgtcattgaatcctcttaagaacacacaaactcaaatattgtgtattagtttcccatggctgctgtaataaatgatcacattcttagtggcttgaaagaatatggatttagtatcttacagttctggaggtcagaagtcctaagtgggtctaactgggctaacatcacgaggtaggcagcaataagaaactaatcttttggtggctttgggtacagtccctttccttgccttttatagccactagaggcctcctgcatgccttggctcgtggccccttcttccatcttcaaagccagcattggtgagttgagtcctttttcacatcatgtcactccattcttctgcctccctcttctaggttttaaggagacttgtgactacattgggcccacagagataatccagaatagtctccctattttgaggtcagatgattagtaactttaattccacctattcccttaattccctgttgccctgtaaggtaaaatatattcacaggttccaggtatcatgacatgcacatctttaagaggctgctattctgcagatcacatatcatcatctccactcttctgagtgtagcagcaagcagtcttttaggttaatgtgctacagctatagaaagttgaaaccaagatatgaaccatgatgcttttggctccaaagtcagcaggttctaaaaggtaaaccttggtccccaattaatgatcaaaggcagtgggaaaaatctaacattctgatgactttgtagatcaatgagttttgtttcacaagtctaatgcattacgttaccatattgatctttactcttcagattctgaacacacctgtgaaagcagggtttactgttcttttgacaacctgccatctctaattagctccagggccccttagtgcagtaaacaaatccgctgaatgactcagtcctctttctcttttcttattgttggatccgttaagctgtacaaatgtagtctatggtggagggaggggtgagagcagaggggaagagaaggggtgcacagttggtcactacattatcctgcttctgctccaagaataaaagcaaaacttaaaaaaagtattgattcatatggtttgttcatatgtatgggaagcatgtgatattttggtacatcccatgcatgtgcaatggtcaagttagggtatttaagatattcatcgctttgaacattgatcaattctttctgttggcaacttttcaaatcttcttttctagctattcttaaatatataatacattactgttaactattgtcaccttactgtgctgtggaacattaaaactcacttctcctatctaactgtaggtttgcacccattaaccgatttgtcttcatttcccactccacccccacacccttcccagccttagtcaccataaccctattctcttacatctatgatacccacttatgaactcctttctcctggtccatgaagtctttaaaagctatttcgtcagaagaagatttgtctgacccccttccctatgtaaatgcagcacattgtcatactctctcaacacactcttatttctctttatagaggtcaccagatttttaactcctttacaggattttctacttttttatagggtgagcggtctatatctattttattgtcactttatcctttcactcctcaactgactacatggtaggtattcaaaaaaaacatttgttgaggccgagtgtcatggctcacgcctgtaatcccaggacttttgaaggctgaggcaggcggatcacctgaggtcatgagttcgagaccagcctggccaacatggggaaaccccatctttactaaaaatataaaaattagccaggtgtggtgtcaggagcctggaatcccagctacctgggagaccgaggctgggagaattgcttgaacctgggagttggaggttgcagagagccaagattgcgccactgcactccaccctgtatgacacagtgagactctgtctcaaaaaaacaaaacaaaacaaaacaaattgttgaataaatggtcctctagtgttttaatggcttttacttttgcttctgctactggtccttattcatccatctacctccccatctatctgtccatctacccatgcatctatgtgtctgtccattcatccactcattcctccatctatctacctacctgttcacacatccacctatccatccgtcctccttgaagacatacttaagagtacctagcaatccttctggagttccacattctcctctctattttcttcagcctgaagtcccaactggtacatgggcttggtgtgagggaactaataaatgcttatcatgagaataataaaagctaagatttatttattgagtgctagtcacatggcagccaagctctaaatgcttcacatgcattaagttagtaagtgtaggaagccctctgcagtaggcatttgtaatatccccaccctgaggatggtgaaactgagagacagcaaccatgggaacacagggagtaaggctgggatgaatccctggcaagcgaactgttaattctatgtctcctaccttcttgttttccctagcctgctgcaagtccagcttaaaggaaggaaagttctaataaattgaaaatgttaactctgtggactagacatcttcacgtgcttcgtgttcaacatgttataacttcaccataatacaaattaccatcatgagtttatttttgtatatggtgtaaggaagaggtccagttacagtcttctgcatatggctagtcagttatcccagtaccatttattgaatagggaatcctttccccattgcttatttttgtcaactttgtcgaagatcagatggttattggtgtgtggcattatttctgggccctctgttctgttccattggtctttgtgtctgtttttgtatcagtagtgccatgctgttttggttactgtagccttgtagtatagtttgaagttgggtaacttgatggttagaatgttctatttgcttaggattgccttgactattcaggctcttttttggttctatatgaatttaaaaatagtgttttttaattcctatggtgggaagaaagtgtggataaaaaactgcctatcagatgctatgtttatcacctgggtgacagaataatctatacaccaaaaccatgtgagatgcaatttacctgtatgacaaacctgcacatgtaccactgaccctaaaataaaagtttaaaaatattacccttttgtttgcttcattttgcaagaaaactggttggctatccccaaaaagatgcaattactgtcatcttcactgagtggtctgtaggtaaacaagcatctggagatgagtttaagtcctcatggtttaggattttaatatatactaattaaaacgagcaacatgttattattcaataaagaatagaagcaattgattttaaatcatagccaggtgcagtggctcgcacctgtaggcacatctacttggaaggttgaggtgggaagatctgttgagaccaagaattcaaggtcagcctaggtatagtgagacgccatctcttaaaaaattaataataataaaatcatagtatataatcatgcttagagtaaagatctggaaggatactcaatatactaggatttccaggttagaggggcaatgggggttaaggatagtgatcacatgcaactttaatcttgtctacaatttttctaacaaaaggtatttatgtattgtgtaattaagggcatgggacggtctgtgaattctgtaatcttttccttttcttttcttgcagcacagtctcactctgtcacccaggctagagtgcagtggctcaagtgtagctccctgcagccttaacctcctaggctcaagcgatcctttctcctcagcctcctaaatagctgggaccacaggtgcattccagcatgccccactcatttttttttttgtaaagatgggggtctcactgtgttgcccaggctgatctcaaactcctaggctcaagcaattctccctcctccgcctcccaaagttctgagattacagactggagcccctgtgccctgcctgtatattgtttgagaagtcatattcttcctcttctgcccgcccctgctggctttcgcaaaagagaaatcatgccgcttttttaggtaatctgtgttctgtggagggtttctaatttacttttaaagttagtggtcctcgacatgacttgtcccagttttgccattgaaaagaccccaaatgtgcatgagaaacctactgtgaaatagatttccagttttgacctgagctttgtcccaaggactcatctgtgtcagaggaggagatcctcccaaaatgtgctttccatggatgaggaagaccagccatttccctttgacggcctccttgcattttatcattccctgagccaccgttccaaaggaagagagaccattggggaaatgattttgagaagaggtctatcaactattccatttcttttgaaccccaggtggcacttctcagcaacaaggaggcatttaggcaaagagggaacagtttctatgtaaaacctaaaacgcttggactcacagagaaaggcagaattaatcactctctaaagtcaccaagagagaaactgacatgctcactagacattagaataccaacagtagcaagcattccactggaagcttgaaaggagttattttaggagaaataaaagaaagggctagttttgaagcaggtaggtcatagataagagctctggaattcagctccttctagtttttattccaagttctccagtgctgggagtttaagatcacaggcattgcatcttatcctatgactcagtttcctcatctgcacattggaaataatgacagtatcaacctcatagtgttgttgtgaggattaaattaaattatacctataggaggggctggccatggtggctcacgcctgtaatcccaacaccttgggaggctgaggcggatcacctgaggtcataagtttgagaccagcctggccaacatgatgaaaccctgtctctactaaaaatgcaaaagttactaagggatggtggtgcatgcctgtagtcccagctactcgagaggctgaggcaggagaatcgctggaacccgggaggcaaagtttgcagtgacttgagatggcaccactgcactccagcctgggcaacagagtgatactccatctcaagaaaaacaaaacaaataaaatgaaacacacatgaaacccagtggattccttagcacctaataagtatgggcccatacatatatcatcatcctcagcattactggaggttattaacagaaattggtgttaataaagtttaaataaacaggtggatttggaattcctttccaagtaaaacatttaaagtaactttgagggtgaatatacaaataagtgaagtcaagatgctaaatccttcatgggtttgtaagtgaccaggggatatttaggacatctcccttatttctaagagtaggagctcatgaaactccaacacctcactctttttacggcctgtgtctgtgcactttctgtggagctgattggacccttgggggatggccttgcaggtcagacagtcccagcatcttcttttcactctttctctttcagtttctgggttttcacagccaagggaaaggtaggcagaactggaagcaagtggaaatgctcggtctgccattcatctaggaaggcagacgcctctaacaagtttgaacctgataaagcctctgcctgtgcaaagaacttgggaagcagccagcaccgtgcttttttacctctgattagttcttcttccattctctcttctgcgatggaaagaaaaagaaaaaaaaaaaaagacatggagttgagacagcagagaaagtccaaaactgggtaattcagaggggcaggctaatgacccacctgagtctgggatcgttaccaacagtgcctggttttcactgtgacaaatatgaaggtaggcccacagttagtgagagagttgccttgtctatctcctggcgtgccttcccacaggctcccagtggagtctggtcatcagtcttctccctttggagcttgggcccagatctcagccacccaggccacgatggggaagagcctggcctgccccaaaggtggccctttcagagtttaagacgatggagatacaatggaagtctcatcatgtgtcactttgcctttgactccgtgttgccatggaaacagaacatggcttgttcatggtaaacgaccttgtcattgatttttgtatatgctcttaattattgtggcatagttatttataacctgatggggaaggaaatcccaggagaagagcattgtcctgctgaattattccatagtgggaaggagaaaagttctgtcccaaagaaaagaggagaaaaggaaaggaaacgaagatgaaattttcaaatataaataagtccttcaggaaaatcgttccccagatgcattattgcattatttaggaccatgtgcaccccactatgtttgctctcgacatttattttggggggttttgtgtagccgtgacagcatttcctcacatctctttaggactgctgatgccctgcatatcccctgtagaactttgcggatagttcatattttagcaatgattttggaattcctggctgaaataagaggctttgtgaattctctactcctatgatggcctttgaggaaattctggatctttggtttggaagttttgggattctgtgaaccaacactttcttttcattgggtttgatacagtggcatcaatcttacagtttatcatgtaccgatgtttaaaactctaaccattggttatctggttaccatcattgtcactacgaaataaaggattagagctataaaaatactaaaatagataatacccttgattatctaccctgtgtcaaatacatgaacccaactgctcaaactgtcattcattggccaggtcatcagcctccgctgggaaggagttggcactgccaagtcccagacccttcctcagacctactgaaccacctgttgcattttaatgacggctcacccctctgcactcctggtatggtttggctgtgtcccacccaaatcttatcttgaattgtagctcccataattcccatgtgttgtgtgagggacttcgtgggagataactgaatcatgggggtggtttcccccatactgttgtcatggtggtgagtaagtcttactagatctgatggtttgataaggggaaatcgctttcacttcgttcttatattctttcctgtctgctgccttgtaagacgtgactttcgctttctgccatgattgtgaggcctccgtagccatgtggaactgtgagtccattaaacttctttttgtttataaattactcagtctcatgtatgtctttatcagcagcataaaaacagactaacataacccccctttcttcctacccctgtgatttgggtggatattaaaattttgcaagccgccactctagagaagtaccactcaaaccatggtctgcagactaccagcattagcaaggcctgggagtttgtgagagatgcagattcttggtgcccatccaaacctacagaagcagaatctctggtggcaggaaccagcaatctgtgctttcaacaagctctctgagtgcttcttctgaatgttaaagtataagaacctctgctgcacagggagacctcactttcattattctcatttcacagatgagaaaaatgagtcagtaggaggaaaagtgattgactcaagtgcttaataagtgtctaagctaggatttgaccctagggcttgtgaatctggagcccatagactcaactcctgtgctatactgcctctgtgtctttggtctgtgttctcttctttttttttttttcttaccaccctccaaaattcttatttatttattttctatcaccgtacttactggtggagtggaagtcccttggaagtgggggacgtgtctgatttgtgcatggctattttgcgatttgccattgctggaatatttagcaagcatcaatgagtcctggagggcttttaaaccatagatgatcagggcccctgcttggtctaggatggagcctgcaattttgcatttgtgacaagctcccacggatgctggtgctcacttggcatagcaaggggttatgctatttttcaaaggcaagagaagtgtgcatgtacttgagaggagaaggggtcggtcaccatttactttgtgcctcttgctacccttcgttgcctggagttctacacactttgcaaactttacctcattaatcttccccaccctgggagggcctgtgtgacaggcactggtacctttatttcacagatggagaggcagcagtgccaaggggctgtgacaggcccaaggtcacctggcaagtcccttgcatggacccagaatagaaacgccaccgcctgccacaaacccctctcctctggctcctgtgaacctttgagcccccaagcctgttaagcctcttcctgtcctctctatcaatgcccacttgcactgcctcctaaattagctttgtgtctttaaccccagcctcgggaggcccaggttcaaggttagcactaagcaccttttgagttccttgtaagttggacgctggaataattctaagtcaagagcaattaattatagaagcattagtcctgcagaaaccctgcttcagtcttttgtttctggctgctgccaagggccatgcacattctctgtattatctttctctgcatgccttcagagtttatacattcatttccaccaaaaagctcatcatctgagacccttactacgggtacagatgtccagacaccacatccagctaaaaatccagaatcaatcactgttttactaacaagttcctcaggggactctgagacacacccatcccggaaaattcctaagtggagccaggtgcatcagtttccaggagcactaagtgtccaaccctgattggctggtaaataattgggagggatgtggcttgggttgagggatgtggcttcgttgaaggacggcctggactgcacttcgtaagccaccttctgtagttctgatactattaattcatgattcatatcaacagaggatgggctgggtagtcgagttcctggttctttattaggcagagaatgtttctccatctggttgagagtctgtcatgttgtatgagtccagggggcgacacattttagaatttgaaaataggtcgaacccgatttgctttctttattaggcagcactcacctgggggaatggataactccatttggttcagtcaaaatgaaaattggccaaagaaagtgttaagagggcctgccatttgtgtgagttgagccataaacattggcctgctttttagcttgtggttcattggtgtatagatgatttcatgatgacgtcagtaaagggtctatgagaacacaaactacaccgaaattgacatctgatagggtcctgttgtctatgtagccacaggaggttagttctgagtgtcttcatggttaaagaagaattcagtcaattgattatgtgattctatttttataaaatatccagaggaattaaatccatagaggcagaatgctgattgctgattgccagggtctgaggggatggggaagtgagagcaattgcctaatggttgtggggttttcttttggtgtgatgaaaatattttggaacttgatagaggtagtggctgtacaacaagctgtcactgaagtattcactttagcatagtacattttgtgactgtcacttcacaaacagagtcacaaacaaaattcatgactgtccttgattttgagaggagactgtatacaggaaagtgctctgtgacttttacgaaataagacaaataaaataaaccctaacccaactccgggcatccttcccttttctcaaagacctcaccctaatttaagagaacatgaataacaaatattttacttccatattaaaggagttcttttctctgtatgtcatttatcatagcaaacaataaaatgggtatgaatcatcatctttacaagaaggtggtgtaacagcctcattctgaatccaggagccatctctagataaaacaagatgcatggaagatgtgacttaggaatgttgagcacatattattctttttataaaatagcagagttgaatgttggggatgctctaaagtagtcaacttcagcttaattgaaatgtgatgcaggcttattgcattattgttttttttgttgttgtttttttttgttgttgttgttttttgagacggagtcttgctctgtcacccaggctggagtgcagtggcccgatctcggctcactgcaagctccgccttctgggttcacgccattctcctgcctcagcctcccgaggagctgggactacaggcgcccgccattacgcctggctaatgttttgtatttttagtagagacggggtttcaccatgttagccaggatggtctcgatttcctgaccgcgtgatccgcccgccgcggcctcccaaagtgctgggattacaggcatgagccaccgcgcccggccggcttattgctttattctaatgtgatgctttggtagacctgagcttcctccacacactaaacacaaaccttgcacttaatagactttgattgaaggtgcattcaaagttcaagatgatcagtttggattctctttttttgtcacataataacgaatatttattgagttgctatagtagggtccatactttccatacattgatctatctaacattacagcaacaccttaatatagagactattattgtttctgtgttttaaaagaagaatcccggtccatcaatcttaattaacttgcccaggttaacagtgtttgtcaaaatagcaaagttgggatttgaaccctgggtggcctgaacaccaaagcctgtactgttaccatcaccctcttataggaatgttccttaagtgttcttatgtgtaagaagagtctgagatgaagagtttcagagggatgactgtgtggccaatcttccctacaggcacaaagggatttttttccgtctcgaaattgtcagcctcctattctaaaggtacaggttcctcctatagagttttagggtcagatgtcagttttaccccaagtccaccactagctagcagtttgacctttgccaagctccaaaaaccatctgtgtccattttcttcctctgtaaaatgggtataatactgacttctgagaaaggctgttacaagctttcaaagaaatggtatttatgagaacatctaaaggctggagtctccggacccactctctcactttccccttctctgtcctcaaaacagcatgcaccttcagtgggtgtaggcctctgggtctccatcctttccccaccaaataatcacatgcagacagttgtaaaaaccacagagcattttcctgtacacgatgtcctcatactgaaccaagtcgttagcatccatgtgtggctttattttttctcacaaggcagcctggaaagaacaaatttatttgggtgtgatggttttgtatcttctactttttaaattattattattattttattatttttatttttttgagacagagtttcgctcttgttgcctaggctggagtgcaatgatgtgatcttggcacactgcaacctccacctcccaggttcaagtgatactcctgcctcaccctccggagtagctgggattacaggcactggccaccaggcccagcgtggctcatacctgtaatcccagcaatttgggaagctgaggtgggtggatcacctgaggtcaggaatttgagaccagcctggccaacgtggtgaaacctgtctgtactaaaaatataaattatttttattgtcctggaacactcctacccctgcccaaatcctgcacatatccacagctgcccttgccctcatctgccggggcagctgtagtgggaatctgtggggccagattgtccgttcctgggaggtgattatttggccagtccacgaatagtgcactgcagtaggcctggctctcggaggcccagggtgggagctgattgctttggcttgatcacatttcttgagagtttcacattctaataattaaaacccaaaatggtgtgactgttgcattggctgcattttgtttcctatgtgtgtagcagggtggtctgatttccttccttataattcaagtattctgaacagcagtatgagtttcggcctgaaggaatttattagggtaatcttccctctttcagccaaaaaaaaaaaaaaaaaatgcacccagaaatgcatttagtggaaacctctagtgacaagcaatattctttcttcctttctcctttcttccctctcactatctttccttcttagaaagaatgttgtgacatcattaggtctgtagtaagagtttgttaatttttctaagaaattatctttaacactgtataaacccagtttttatttcatatgatcagatttaagttggtgcttcagtctctaagtcttacaacggtgtcatttgcaacaacatcaatcattgaattgcacgtcaacggctgaggacatctttctctgcacaggaaaagtttcctttcaggcaggttgatctggatgttagtttcaggataattctctctctctctccaccctcccaccccttccagcagctcacgccacgtcttccctctccctctccttttatctacctctcatttttatgtaaagcattgtctttcagataatattgttcccttgtgaattttatagaacggttattgaatcattttcgcctcgatttccaagtgtgttacctttaccttgacttggtgaatcacagctgttaaactgtgtctcgtgattttcattttagagtaggtcctggtttttattatagaatatgctcatcttttctaagccttgtgtcctggcttgtaggacagggttggggttggaagtaacttggggtcatttggggttttttttagaagaaagtgatggagtctgggaatttctctgcaggcttcttagagtgttcagggccattctaatgctttcccttggttcagtcttgcaagactttcataattgtgagcaaccacagtgtcttcccctcttttggacaattaagggatttaaaatatagatcgaagttggacacttgttggtgatttaggagatgaacagtagcactgtgtgtcagatatctgagaacatgcaatatttgctcagtgggtagtgggataagccagttccatccaagtcatgcagcctaagaatgaagaggaggcttggggtctgaaccctgtgggtttaattctgtctctgacagttaccagttttgtgactgtgagctattactttcattctgcagtactcatatgacaaaagatgggagaagtgataatggtattcccttcataagtatttttgtgaaagttaaattagatgacatatgtaagatatctaacatatgtctgatgtatcacggtcacacaataatattataacttattaaatttattattactgttgttgtcagtcaggctaggttgatgctgtaacaaacatcccccaacttttcaggtacttaacagcatcaaagttgatgccttattcatacaaagccatgaacaagttttctagatcaagtgataacaagcagattcaggctccttccatcttgtgactctgctgtttcctggcttcagtcacccttgaatcatccaaccaagagacagaagcaagagccactgagctaaggatctgggggtgggaaatgtggaggtcaagtctggagtggacattcctcacttccacctgcatgccattggccagaaccagtcatgtgacctccatttcaccacagagtagcatgggaaagagtctccctggggccctagaaagatgaaacaggattggtgaggtccacccgccacagggttactttttggtacctgaaattccccttttttgctctgttccaatttggaagaaacttttcttttgactctgggctattacttcgccctagccattggggctcagcctctgtggtctcagcttattgtcctcttcctctgttcccagttcttgccttgaccctagagaatttcaacactctggtcctcagcctagcaggattgtccactctatcctgaatagcaacagtcatagccttctaattagggacatcataggtttctcccagttgaaacacacacacacacacacacacacacaatattatttttaattgacagacaataattgtatatgtttgtaggatacaatgtgatgttttgctatctgtatgcaatgggcagtgattaatggttccatttaaaatacgcttcttaagtataaggagaatatccttcatcagtactctttatattgcaatattaagggaaacctttagaacttaaagaataaataccttcttccaagagtcaagtgacactatcttggaaataaggtaatattcaaagtaggtttttaaaatggttttatagaggtataatttatataacataaaatccacctttttcaattttacaattcaattatctttagaaaatttacagtctaattttagaacactgtcctctccttaaagagagctcgcctccaagcccatcttgcagtcaatctctgttcccaccctcagccccaggcaaccactaatctatcgtgttcctagcagcataattcaaaatagcccagaagtgtaagcagtcaaaatgtccatcaactggtgagtcaacaaaacttgctatattcaaatactgtaatacactttagccaaaacaaacaaagagataaaacaaaaaaacagaatacaaatagaagctacaccacatagatgaacctcggaaaacattatgcacatattatgcaaagtgaaggaagtgagctgcaaaagactacttattatgagattcctgtttatgaaatgtccagaaaaggcaaacctaacgttgattttgattgcaattttccattaggcaaatacctagaactttcttttctaggagcctgaactactcacatgccttgggcctttggggctaattctctttaacataagaatggctaatttgttgcttcttagatttgctttgtcattttgtctaccaagggaagaaattcagaagccaagaaggagatggtgactttgccagagccatattaaaaaggaaaccatcttacagctcatcattcctctctcacctgaatcttgtttgatttctcaaagcccatgtgggaccaccctccatttttaagttactgttttggagaatatgtacagtgtctactggcacctggtggcaggcaggaatgtttaagctgatcatttgttttaaacgtaatccatttgtaacgcatgattcatctattgctagaaggtacttggcatcctttgcatataccgtgactcaaactgtgacaatgtttatagctcagaaggtaaaaaaaaaaatcagagttttgttcatcagaattatcacaaattccacatttttggaattgaagataatgccatcttagcctatttaagactggcattctagaaagaggcatgctgatgcaagcaaagcaaagacaatcccaaaaattaacctgttttagaaatgagcagccaaatgtctcctaaacttctatggttattttcatggacactaccttttattttattttatttttttgtttttctgcttataaaatactatgtactaattgagaaaaacttggaaagtagaaaaaaaatatatatatatatataaattaattcccttgtcattcctgtgtctagaatagttaataacatcattctgatggatttaccttttatttatgttttcctgtatgtatgtgagaactcaggcacttaattgggcttaagctgtatatgttccataccctgctattgttgcttgacattttattatggatattttcctccatgtcattaaatattcttcaaaaagataaacttaatggtcatagtaacccaacatttttggatacaccatcccacttgccaccccccagctctttacactaatattgctttagtcttttttttttccatcctagttaaaagctgagatgaaaatttgtaagtagagatggctgagcacttctccattttccttcaatggctcttaaaagtaaaataattggctccaggtatagacaatattaaggattgaaattgtctgtattgacttctttatcaagaatcaggtagttttggccgggcccagtagctcctgcctgtaattccagcactttgggaggtctaggcaggctgaatcacctgaggtcaggcattccagactaccctggccaacatggcaaaaccccatctctagtaaaaatacaaaaaaaattagtcaggcttgatgacaggtgtctgtaatatcagctactccactagggaggctgaggcaggagaattgcttgacccctggagtgggaggttgtagtaagccaagatcgtgccactgtactccagcctgggcaaaaagagtgagtatctgtctcaaaaataaaaaaaaaaaaaggtagttccatgctcttataaataaagaatagtactgcgttagcacataaaaatgggttgaccttcaatgagacggtcatggactttcgttcagaaagactttaggaaagtctcttcattgccaaggggtatggtccatctcttatggaagtatgcatatcataaggaattaaaatgactctccttcttttcctttttttgagacggagtgtcgctctgttgcccagggtggagtgcagtggcctgatctcagctcactgcaagctctgcctcccgggttcatgccatccttctgcctcagcctcccaagtagctgggaccacagatgcccatcaccatgcctggctaatttttttttcggatttctagtagagacggggtttcactgtgttagccaggatggtctcaatctcctgacctcgtgatctgccctccttggcctcccaaagggctgggattacaggcgtgagccaccatgcctggccacccctccttcttttaaaaaattcctgcagtcactctgaagaatgccatttagaacattcgagtgaaccaaacataatcagcagcccagagaagacctcttttacctgcctcctcttatgttgctgctgagatgaacacagtccttggaaagtggtggttgtgcctttgcttttttgtttttttgtttttttagttatgggccttgccattggtttcttctgggtccccatctgtggcctctttgcttatcatggcctggtgaccccctagtacctgatgatatctatagtaggtctgctaggaaaggcttggagtcttcctttcactacccatgaaatgaccctccaggcaagtcactttcctaacacagcattaataggtgttgcttctttgagataacctctttcttatccacatgctcagggtacatatctttgtgtttttgtttagtaagacacactcctctgaagctaaacttaatctgcggagatgtcggatgataaatttgtcccctactgtagtgtcataatatatcctctatgtattaattaaaatgaagttagatattgcttttcagacaacattagttcaagatgctttcagtacaggattaatacatgtatggatgcacggatggatggatacatagatgaatgggtgaatgaattggtggacggatgaaaggatgactagatgcatgggtggatggataggtgggtgggtgggtgagtggatggatggatggatttgtgggtgggtgggtgggtggatggatggatgggtgtttggatgggtgggtggatggatggatgggtggatgaatagcaatttctagatcttactgtctataccttactttgagcactgagaaggaaataattaatagttgattctattaatttatgcttccaccagtttcctggaaattgaatttcagagttttagccatgtttcctccaaaaaaatcattgcctttcttgccttatcaattaagattagtcttgaaaaaaatcccacctgtgatgtcacacacagctaccttttgctgttaattctggtgaaaatattaggctcactattaatatcaatacttaatggatcataagaatcaaatatcaaatgaagagaccaacatacatgtattacttcttaaaaaaatctttaatgactaggaatgtattttaatattggtgatacctaaatttaatgcaatatacatgtctctgttgttttttagacccaagctttttctccttgagataaagaatgatgctcagggtagtgtagcagagtggttatagaagagggccccggaatcagctttctgagttctgacagctctgtcatttggtactcgtgtgacaatggatctctgtttcctattctgtgaaatagagatactaacacttgtaaggtggttgtgatatgagggtgaaagaatgcaacatagctatgtgtttaatggagtgcctgtcacacagtaaatgctgctacagggtaggtggtgctgtgctattatgtggcattatcatcatttcctttattattaaatagcagaagttgggatggattaggaagcagacactcagaaaatatggtgagcttataaatgttctttggtgcaataaattgtcacacagttggtggcttagcacgacatttattctttcacagttctagatgacagaactctgaagtcacatagaggtgctactgggcctatctccttctcaaggtcctgggggagtgtctcctccttcctcttctagcttctggtgggtgctgcccttgactggcttgtggccacatccctgactccttccaatctatgtccccatcttcacatcaccttttcctcttctgtacacgtctgatctccctctgctctctcttatagggacgcttgtgattgtattaatatttcggacccacctagataatccagaataatcaccccatctgaagatcattaattgaatctcatctacaaagacccttttctctcacaagttaacatgtacagactacagggattaggacctgatatcttcgggtggcgattattcagcttaatacagtgggttagaaataaaacttgattttccattgtacaagaatgggggtttagtcttaatggttttatcatgccatgtacataaccactgtcagtatcagtgggggcgttttctgaatcgtggcttttgttttctgtgagctcattgccccctttcccctttaatattctagtaaagcttattttacaaagaaaaatgcctgcagtgaaaagcatttcttgatcatctttggatcaatatgtaatatttatatttcactgaatcttcatgccgtgtttcaggtttagcttctgtgtcaattttgaaatgatctgtggtaaattccatattggaaagacatgggtctcctctactgacttattttcttcttattccctgaaaagcctttcttatcaccccaggaattgtggagataaattttttcactcatgaggcataatatagttagtcgatgatatatttgttgtaaaaaactctttttccattgtagtccaaacttaaatttccctagtgttcatttgctttctctattttctagtgcacttaaaaatacatttgcagtcacgattgcctgggtaagttataaatcctagatattagaatttttatgctttagaaataataaatgagggcttaccaattaaagataaaaaattacttgactggggatagtagaatattttatcagtattattaaaatttaagggcagctgaaatgccacaggaatccttgtacaacattttggtttaaaaagttggcttaaggataagttacattcttttcttcaattttacatcaaataggatattatataaatttcttaaaacagagcagaaatcttgttgaactgaatcaaatgcagagcttttctccagttgtagccctgtggttttactttttatgtttggaaatcacttttttatgtatcttgggtctctaataattaccattattactttatcaaaataatgttaataccacacatggaataaataacctcatgtgatttattgtaaaaccaaggatttaaacaattaatatatttaatccatcagcacatctactgtctatggataagtacatctattttgtggatgatcacaacaggtttttcactctaatttttggttttctgtattttcttcttcttttttttttttttttagttcattattcttttagctctctggtaccctggcttcttctttgtaggtcattgtgacttctttgcagcatcatcacaattctctatagcttgataaataacctctctggaaattgatgattgctagagaatagcacagaattctaggtaggcactgaaaaaattataaaataaaataaaagattgccttttcagaagatgatcctattaggagaagcagaattctgtatcctgcacaaacacaattgatacctaagtagtgtgcatttttaagcagtcatttgtgaaatgatgtggacttaatggcagattaaaacaactacccgctgggctgtttcaaaaaacaaaaccctccaattaagatggatccatgagaatgtgaaatcaatctgccctaacattgagcactttctgtgtgaaggacactccacgagtggcatgaaataggaacggaggagttgaatatcatctcagtcctcaagaactgtataatccagagcagtggttctcaatgggggacagttttgccccccgccagaggacactaggccatgccttgagacctatttcactgctgcaaccagggaggcagtgctgctggcattagtgggtagaggccagagacggtgctaataattctccagtgcacagcaccagcccccaccacaaagaattacctggctcaaaatgtcaatagtgttgagattgcaaaatgctagtgtggagtaaagggaaaagcatgtgcagaaaacagtatttcaaggaagtcatgataggtaccagcatatttatgagggttcagtggaaggaagagattctcatgggttatacaggggtggaatggggaggtcagacctcatgctagacttaggaagtgtgatttgccttgaaggatgggcgagagagggagatcatgagggcatttcataaagaaaaatggcaatacaagaatgatattcataattcttaatgaaaagtacgccacatacactgacttgctggaacagacgtctcatcagtcagaacagaaatgcaatgtcaccccattgttggacatacaggtctcatatcagccttgtgacaaccactctgtctcaagactcaatcagctatcttgttagaactagttttatggtgaactgggatgggcttattttcttgaagcccttcaataagaaaattggactttcctgatacacagagtgggctgtgaaaccaccaacaccttttgagttaaggagtttccaagaaagtttgtcattctacttccacccactttgtcagtgaatttcttaaaaggatattaagtgtgtgatggaatcttataggcatgtcccattggagttacagagcaaagccccaggactatggcttttgacaaatgtgtcatcaaaataaactgggtatttctaatgtgagtcattggcggtaacaggataggagaagactgtgatgatgaaggcagtatttcaaggagtttaattctggggcaaaatgcagcatgatttggaatgagaagaaaccaaggaagacttttgaaaattgtttgggtataggtagtggggtcagaaattcagacatacattagtggtatgattactaaagaatcagtaccatctaaactctctcatcttcttttaagtgatttgacaaaaaggggtaagtgtatggattgatataaataatccatatacaatacttggctcagaggataagtggttttggacttaagaaacatatgctaaaggtgtgattattaaaggatcgctaaaacttaatctgtctcattttccatttagtgatctgataaaaaaaaagtaggtgatgttatagattgaatgaagtatttcacatgaaacacttggcccagtgtaagagtggtttggaagccaataactggtatattccagaccaattagctagctggagccaattaaccattaagttcttcattgttatgaagaaggtaatacattctgtggactttaagaacttctgctataagggttataggatgaaatgcaggtaggaattgagaacagtgtctggaatcttgtcagtgttaaataaatgaatatagtaaatggtccttcaaatgtttatccgatatgtgcattctaatagagaaatcaaagtttaccttgacatgttgagtagtagtcacttgagtaataaaggttcgttaaagaagtccgaggctgggcacggtgactcacgcctgtaatcccagcactttgggaggccaagatgggcggatcacctgaggttgggagtttaagaccagcctggccaacatggagaaaccccgtctctactaaaaatacaaaagttagctgtgcatggtggtgcatgcctgtaatcccagctacctgagaggctgaggcaggataatcgtttgaacccaggagccggaggttgcggtgagctgagatcgtgccattgcactccagcctgggcaacaagagcaaaactccgtctcaaaaaaacacctggagcaagttctgaggtgagagatggagtggaatcgttttcacatgcccagagtttgatataaagaagggacatgtctgagtgaaatacttagcgggcatttggaggattttgtatctgagagatcagagtaggattgactggtttggaaatctttgtagaggggagttggaaagtgttggaaagtaatttgctacatcagcttttaagtatctcctgtttattgtttgcatttttaacttcatttgggcctagaaatggcaaggaagcaccattgaagccaagaaaaatgtatcagacagctattgccaccatggttctgtgtaacaaaccatcctaaagcatagttcctcagataactttgcttactcctgagtctgtggataagcaggcatgtgagtgctatgtggctagtccggactggattgtagactccaagatgcaagttgagttcacatctgccctggtgtctttcatcctccttagaccagagacttctttggacattttcttctcttggtgaattacagatggacaagagggtgaggccgattgcaaaagggcattttaagcttctgctcacatcacttcctctcacctctcattggccaaagcaagttatgtggccaaatccaaggttaagcatcaacatagccaccattaggctatgatactgatgtgttttttaatactacttcagggaagtaaagagccagaagaaccacagcgacataaaaggaaatttttctgggtgatgaaaagtgcaagattttgtgtggacttgttgatggtactgtggcagccatcctgtgggcatgatgagatggccaggagcatcacagagacacagctcttgaagcaaaggcagaaattgcctgtctccgcatttgttgatattgaagccgtgaagtcatgctctctgttcctcacagtgaagggcaagactaaggacaccagaggggtatgaggagggagaaaagaagaagctgaaactggaccttgggcttcacccacatttggagttatgggagtggcagaatgcctagcatgtaacatacactctagaaatgtttgttgtcttgaattgatttgaaggcgtcagacaggccgtggtctctgtgtctttttacatctgttattccactgccaggccgttctcctttgctcccatcccagagaaacctgtatcaccaccggcataataatgacatttcattattacgatctgatactctagggctggtatccagctgttctaaatagagcaggtttctgtcaaagaggtttcacttaggactaagcatgactattcaaactactgccacctggggagaaattatttaccgttcttcctagttgtcaatctctagataggtatgttctcattattttttttctcccttcatcttctctcatattcacaaagaaaaaagttttgtgttattacagaatgatctgattttagcaatgaacttcttctcttgttggttattttacagttagattcttggatgaatattatttccatcttatgcaattaagagtgatctctcatctgatttcagtgaggaaattcttctgtcgttgaccattttacggttacagtctttgaggaattttatttccatcttatgcaattaagaataatatctcatgcggcattaaattgttggactgtctttgaaattgaagacaatgagaaaattctagcatgagcatcacctttttgtgtgtacgtagctttttggatctcattacttacagtataaaaaggcaatagttgctgcagttatatttatagttgtttattcctcatttttctaatggaacttgtcaattagaatcaatggcataaaagttttcttggagggggcgtaacttatggactactaacactgcctttagttcagtctttctgatactgtttttatgagacaaacaatgatatgcttgccttgtctgttggcaccaaacccctttgaaatgtatgttagaatgtattaaggtttaggatgactaatggctagtgatgcaggacgggcaagtccaaaagttggggcttagcctgggaggattattggcttcacctgcaaaagaattcatgtgcaagcagatggtgttagacagcagtcttctattgaatgatatggctccttgcagaggagggctaactcataggcactgagcccagagttggcaacatacgggctattcacaactatatttacactgacttagaccattttcagttacatgcaaattaagggacaagttaatgcaaactgaggggtgggttatttagaactttccaggaaaggaacagtagcttccaggttgttgtcatggaaaggggtagtaacttccaggtgattgccatggcatttgtaaactatcataacactagtgtcttctgctaacgagccgtgagggtatctgggtattgcttttatcaccatttactagttcctgccattttatttttacttcatcctgtcaggacccagaaatatgtcctgccagtctcctacctaactaggattcttgtaagaaatagttggcataatgtggagtataaactttaagttttaggatttcactgccccttagaatgtaacaagtacaaattaaagggcttgcataggattgcatgctttaaatttttccagagaaaaggcaaaaagaggtctttattattatgataattttataaaataaagtgaattgaagccatatgcagtagtgaggatgtcttaacagagtagccctttaatagatttgtgcatattggctggcccaaggggtgggctatagtgagatctgtacttgtctgcataacgtctgttttttttcccctctgtccttgcatggcagccaggtggtataagattgctgagataaattccaagtatagcatatctttactctaagctagtggtcagcaaactttttctagaaagacccaggatttttgtgttgtgggccgaacagtctttcttgcaactacttattgtttatttgtgaagtttatttaccaagctacacagtgggctaggtttgccttgtggtcataattccccaatccctggtctacattacatatgataatctccagggactcaggcctctgctctcctgagctgtggtattctcctgacccacacagatttgttaaggaataggaaagtaatactatgtgcactagtgaggtataaatatctctagtacccaaaggattataaatcactctactataaagacacatgcacatgtatatttgttgtagcactgttcacaatagcagaaacttggaaccaacccaaatgcccatcagtgatagacttgataaagaaaatgtggcacatatacaccatagaatgctatgcagccataaaaaaggatgagttcatgtctttttagggacatgggtgaagctggaaaccatcattctcagcaaactaacacaggaacagaaaaccgaacaccgtatgtcctcactcataaaggggagttgaacaatgagaacacatggacacagggaggggaacatcacacaccagggcctgtcagggggtggggggcaggggaggcatagcattagaagagatccctaatgtagatgacaggttgatgggtgcagcaaaccaccatggcatgtgtatacctttctgacaaacctgcacattctgcacatgtatcccataacttaaagtataataataatttttaaaaagctgttaatcaaagttttcttattaccaagaaggctgtaggaagatactaccatgcattgcagtggagattttcttacatgaatatgataaccacaactgctgcagccacttacccacctgcttggagatgaagccagtgcaggtgaggagaggagcagagtgaagaggaacttctgaagctaaaaatatctgctagcttgtataaatgctagagtgcccagggtttcctgttatgtgcgacagcatctttcattgccgtttaatcaagtctgagttgggcttcttgttatttgcaagtacacatacctcagctgataggggagaaaacagaactcccgtgaataagatattactaggaatttagagacatgggacagcagagaagagatgagatgaaattgggagacagagggagagagaggctggtggctgtacagtaaaggtattgagaagagataagatgaaattgggagacagagggagagagatgctggaggctctacagtaaaggtattgggataatctccgttggcagatactagaagtcctttcaagagctagagtattaaacatctagttctgaatagggtgtgtgtccaagatttaaaattcctctgcaactccaaacttcattaaagtctgatgccctcaccaaagccttcttggagtagttgtagataaataaaggctgagatgctgagttccattcttgggtaagccagacccaaatgaacgggattccctgtgaaaagggtgagagttcagggggtaaagaattaaagccacaaattactatgagtgtgtaaattcctaggaatttgtggacatgtttggaagtatgctaaacgtacaaaaaaaaatatgcatgacaattacctttaaaactcagaagacagcttcaccttcgtttccaagttcattatgcatttcaaatgatcagaactaataacaattatgttcaccatacaatattagatcacctttcatggtttgaatggttccgctccaaaattctggtgttgccgatgtgataggattaagaggtgtggccattcagatgccattaggccagaatggctcctccctcataaatgagattaagcccattgtacaaagaggcttctggtagcatttggctctcttggccttctgccttttgccgtgtgaagacacagcattcctctcctctggaggatgtagctttcactcaacaactgagcctgctggcacctaggtcttgaacttcccagcctccagaactgtgagaaatacgtttctgttctttataaattgcccattctcagttattttgttatagctgcacaaaatggagtaagacgctatctaagatgagttatctttaaaatatttggaaaaaagacatagtcaagttttctttaagattttttatgtattctacttcccctaatgatctagtttccttcccaccaccatgattaaatattttcttctaaacacagtgaaagcagtaattttgttggtgataaagcgaaatatttctagtaagaacacaagatggacatctgtaacttttgaagtagcagctgtaaataatttaaaaattttttgagataattttgcactttcataagagttgcaaaagtagtccagagaatttctgtatagtcttcacccatcttctctgagtattaacattttatatcaccataatacaataatagaaactaataagttagcattaagaccatgctgttaactgaaatatatacttcattgagtttacaagattttactccagttcttttactctttttctcttccaggatccaatccattattccacattgtttttagttgccatatcaccttatgtctcagtccactcaggctcctattatgctattacaaaataccttacattgggtagattttttaaaaagaaatttatttcttatagttatggaggatggaaagtccaaaatcaaagcaccagcagattcaatgtttggtgagtgctggtttccagaatcatagatggcatcttgttgccatgtcatcacacggtgtaagggtcaaggtagctgtcttggatggcggcagtggctgctgctgccgccgcctccgcctcctccttgttctcttcctttctctttctctttctctctctccttctctccctctctttctctgtctctcttgctctcctccctccctctctccctctctttctttctctttccctctccttccttccttccttcttccttccttcctttcttccttccttccttctttgtttctccctctttctctctctctctctgtccttccttccttccttctctctttctccctctctttctccctctctttctctctctccttccttccttccttccttccctccttcctctttctctctttccccatcttcttcactaatcctgcacatgagggctcttgtcccatgacctaatcatctcccaataccatcacattagtgattaggtttcaacatgtgaatatggggagggcactaacattcagaccattttaccttagttccctccagtctgtgaatctgtgacaattcctcaggttttttttttttttgatctttcatgactttgatacgtttgatcttgcttgccatgggatcttgggtgggtcatataatatgtccgagtgtcagtttccacataggttttacagatataatggcattacctacaccatgtttcttagatggggattatataaagaaatcattttggctcaatgaatatgagctgtttataataattattgttattaattattaatattaattttagaatttttaaggggatatttctcagctcagattatctgctgtttgaccctgagtagaatgaatttatgtgttcttggaagggatgccacaaaagtgatgtgtccttagcagatcacaatggagggtcaacgatgtctttatatcttattactagtgatattagccttgatcacttagttgagaaggcatttgccaagtttcttcatggtaagattgtttttaacctttgaacttaaaagtacactaatttattactttgatggcccaatggtgattttcaatttcctctcatgccctgtacatgtattcattggaacacttgtgtaaggaagcatttttcattctcctccatttattcagtatttatatcattattgactcaacatttattttgaaggtgagctataatctaaaactgtcattatttatttttgtggctcaaatcattccacagggtatccacaggctggtttcagactcgtgaccctaagcaatcctccctcagcctcctgaaacactaggagtagaggcacaagtctccatgtctggccccattaacctttttagagtgcacatttcagtggaatttagcacattcgtaatgttatgcaaccgctacctctatccagttctaagacatttttatcaccctagaaggagaccctgtatccagtaagcagtcactcttattccttctcctctgccccagcccttagcaatcactaatctgctttctctatgtatagattttccttttctggatattttgtgtaaacagaatcatacagtatgtggctgtttgtgtccaacttcttacatttagtatagagtttttttgaagttgagccatgtggtagcacacatcagtgcttcattcccttttatggctgaataacgttccactgtatggatagactatgtatttatccgttgattagcatttgcgttgttttcattatttccttgacgtaaatagctgctatgaatatttatggagaagtatttgtttgagtacatgttttcagttcttttgggcacatacctaggagtggaattgctggatcatgcagtagctctatgttcaacttactgaggcatcagcaagctgtttcccacagcagccaccccattttacatttccatcagcaatgttggaggattccattctctttgtaaacaaatttcctatgttgtgctttcctaagggggcactggagtgaatggcatcctctccaccatcttgcttgtcatgggatcttgggtgggtcgtataatttgtctcagtctcagtttccacatgggttttataggtacactggtaatacctaccccgtgtttgttatatgaggattatataaagaaatcatcttggctcagtgaatatattagctgcttataataattattgttattaattattaatattaattttccctttccttctcaggctcttttatgttcttgcttgtggctctgaattcagatgtctgagtaaccttttagcaactcagatctgtccctgcgtttctcctctttgtaagacgtcagttctggtgctgctaacattcactgcagcccctcactctcttttttatccaaacatttctggtgtacagaacacatgcttctggatttatggtgggggctggtgaagagaagagaggagaacgaagtctggggctgttgtgtgaaacagcttgttcttcctgcagatttatttctattatttcctagagttttcacacttgatcttacatgaatgcattttgtaattttacattctactttatgatttattcatgtgtgtcctaatattacaatcaaccatatcttgataacaaatcttcctgtccaactggcctgttgggagtgtgcacctggtgtgtcctgtatgtccaggcacagccctgccaacccatcaaaatacatgcactgcaggtttatgggaacttcagtgtgtacaagacacgcctgaagagctggtcaaaacatgagactctagactctgctttgagacacagacttaatgtgtctgtgagggcctcaggagtctgtattctttacaaggtgccccagtgggtgtgatacaagctggcctgtctacatggtgggccacctgtagtgtgctgagtgtgctgtggaccacctttggagaaacaccagggaaagtgatgatgcttgaaatccttgatcctacctgcttctcttcatctcaggccactgcccgtacccagtacccccaaattctagcctccaggaatgatccagccacattaacctttttgtttttgctgtgtctgactgtgtcactccatttgcttgtacactgtgcctgccttgtctaagggagcattcctgctcatccttctgaggctcaactcagtggggacatctgttcctctgggagcttagtgtagcatggtggttaacaggtggggagctcttaaggtcaagggtgtcagggctagtctgctttctacatttaccagctgggtgaaggtgaacaagttcattgatctctctcagactgtttcctcctctgtaaaagaaggaataactaatggtacctatctttaaaggatgactgtgggattaagtgaggcaatacctgtaaaatgcctaagacagagttagtagtcaatgactctttttgttattttattttatttttgagacagagtctcattcactgtctcacccaggctggagtgcagtggcatgatctctgctcactgcaacccctgcctccggggttcaagcaattctcctgcctcagcctcctgcgtagctgggactacaggcatgcaccaccatgtccagctaattttagtgtttttagtagagatggggtttcaccgtgttggcaaggctggtctcgaactcctggcctcagatgatccgcccaccttggtcttctaaagtgctgggattacaggcgtgagccactgtgcctggccctttttgttattttttaatgtttttattttcttttaattaacgtcctgattgtctcatctgctagtctgtgagcctcttgacagtggggaacagtcctcaataatttgtgtatttctgttatttataacagaaccttgtgtctaaaagataaacacacacacacacacacacacacacacacacacacacatttttaaaggagctttcaacctgctgggaattcttgaatgaacaaatgcactttatgaattccctaatccttttctttgctattttcaccactttctcattcgagttaatctctgaagacataataccctgccatggagcctcatccctgcatgggctatttgtcacatccaggcttatattgtgctgactaggccttccgtgtgacacccgctccccattaatgattgactgacagtgggtggccaatgtgctgagtcagcaccctggggctcactggctcttcccttattgaaggggaaaggagtaactttatcttttcagttaatgggaaaaaaaagccacgggacctttgtcatccattctgctgggttgcggaatatgatctgtgtggctatgtgtgtgtatgtgtgtgtgtgtgtgtgtgtgtgtgtgtataaaatatactctctgattaaagcaccaaagttactgccaataagcttcaggataagtagaaaagatattagtttaaaagactgaaataccaccagtagaaaaataaaacaatttttcagcaaaccataaaaaaaaaaactattggaaatatgtaaactgctgttctctggagaatattagcattttaacacacatggctatcagaagaaaatctttgcataacttagggaggtacttaggaacattgcaaaattttaggagatccctcaaaaggctacacctaaaattgccttatgatgcagcatttccattcctatgaatacacacaaaggaactgaaaatagaatcttgcacagatacttgtataccagtgtttattgtagaattatttgcaatagccaaaaggtggaaacaacccaaatgtccatccatggatgaatgaataaataagatgtggtacatatatacagtggaaaatcatttgtccattataacataataaaattctgacatgtgctataatatggatgaaccttgcaaacattatgctaagtgaaagaaaccagatataaagggacaaatactatatggttctacttctagggatactaaagtagtcaaatacttagaaactgaaagtagaatagaggttaccaggggctgaaatgtgaggaataaggagttattgtttagtgaattcagagtctcagtatgggaagatgataaaattatggaaaagggtagcagcgatggttgtataacattgtgaatgtactcaatgccactgaactattcacttaaaaatagttaaaagtaatttcagcactttgggaggctgaggtgggtggatcatttcagctcagaagtccaagaccagcctgggcaacatggcaaaatcccgtctttacaaaatatacaaaaattagcccggcatgttggcacatgcctgtaatcccagctcctcaggaggctgaggtccagggatgtcttgaccctgggaagtggaggttgcagtgagctgagaatgtaccactgcctgggcaacagagcgagactccctcaaaaaaagaatagctaaaaggtaaattttatgttaggcatattatatcacaagaaaaaaatacaaggagaaaagcatataccgcttaaaaaaatgaagtcttgcttggccacaaaggttcattcccttcatggggggctcattggtttctagctgccctcgagtgtgagacataggctggagactggtaactcgtgggctggaactcacccttctgggtgttttgtttgcaccacacagtttgtattatttgtcagcatttcactaagaggtatttggcatcaaaaactgaaactggattcccttttatgttggatggtttgtccatgctgggtccacattctcctttgctacccagctccctctaaagagagtcttcagtctccatgggcacctgggccctacagaagcttgcagttatagccccagcgtgaaagttttcactctgtctcagagctgaccctctgctattggagtcattgcctttgtattgtaggatttgattattgtaatgtaaatgagcctaagatgacccctagggattgacccctgggttatttcttcactccagactgggacctggtagctggaaagcccattgttgcctaactcaattttttcttttttttgagacagtctccctctgttgcccagactggggtgcagtggcataatctcggctcatttaaacctccacctcccaggttcaagcaatcctcccacttcagccttccgagtagtgaggattacaggcatgcaccagcatgcccggctagttgttgttgttgttttttgtttgtttgtttgtattttcagtagagacggggtttcaccatgttggccaggctggtctcaaactcctgacctcaagtgatctgcccgccttggccttccaaaatggtaggattacaggcatgagtcaccgtgcctggcgccaattcaattttttaatacatccaattattttttaaaaatagcccaaacaagcagatttttaaccatctacaaccagcctgctttccatatttcacagtgcctcaccagccttaccatttggtgaaataggtctttgtagttacaaggctccaagttgagccaacgctttggaagcctccaacccagagactccccaaggggctgctgaatgacatcacctagacaagtgatcccctcctcagagttccccatcctccacatccactgctggatgatgacttgctcacacaagcctctggatggtctcatactgtaagggacattgtgcagctccctgtgcatgtgttacctcctcttacagtcatatctttgtcaagcccccaaatccttaagttccctacaattattacaatgtttttttcttatatgaaattataaataataagtcactagatggaggaggatagagatggaggagaagaagaggtgggtctacttaagagggcctttttctcccctgttgagataggaaaagcaatagaataggtgttgggaatgctcttgtttgccagggccaggagagagcatcttgtttgtctgctttgggtacatggctaggccttccaagagtcagcctcatacacatttgctctttgatgttttacaaggggccctaaactgaggataacccttggagagttaaacaatgtgaatgccatatgcctggagtgcacttctcattggtcaaggattaaattcatgggaatcgtgtacccaaagcagatgcagcctcattgtaggttctgaatccagggtgaaaaggccttgggagctgactgcagtcagcagaaatgcgtgtctaacctggattgatggttctggttgatcaggatttgcaggaaatagagtaatgcaattaccatccttggctcgctctctgtgggatgttctcacagatcagtggcaaagggttggtaggctattttcctcccattgtattgtgagatgtacaaaccttcctactgatactgccggggagagattttctgaaggattatgaggctgctatttaaaaaagtgatttccagttaaatacctttcagtattaaaatggtaaagctataaggaatggggggatagtcttccataataattgcttctcaaggagcttagtctgattgtcttattaacaactttaacttcatccttttcctatgacaaatgagaaaagaattctgtgattcattgaacagtcagatttccaatatggtgtttacttgcattttcgtttccacttcagccaggaaatcaaatccgagggattaaataccccatttgaaatgtaatggagaattacaccaaaaaaggaaaattcacccacaaactagagcaacttcattcaaaatttcagatagtcaagagcgccagcgcatcgaggaacagtgacctaaccttcgcaggccgttggtgttagccctctcttaccttcctactggtgccatgaaattcactttctggcagtcatcatagctaatagtggccatgcattgaatgcgcactatgtgccaagtctggtgattcttatttttttttaatttaaattttacaactctgtgaagtagatacttccagtgtcccattttagaagaaggaatcagacaaagatagttatgtaatatgccgaagatcacagacatagtacatggtaaagtcaagttccaaactatcttccatatggctttagactgtaatccaagtcagcatttatgtgcatgctaccaggtcaggtatgatgggatgcctctttttacttaatatgtatattctgggggtctggctcctcccctggttttcactagagcaggttttgttctttttttacaccagaactctctaaaacccaaaggcataacattcacataatagtcaacatgtatgtatctcaagggtctactagagaccaggtaatgagctaggagctggaggaaggaaaagacattaaaaacaatggtcctgccttcatgaggcttacactctcctgagaagccagcttacaaagaagcaaacagctcagaaacaggttatgccttatgccaggtactaggaaaaaaatcaatgtggttgtgagataaaaaacaaggagggtttcatcgatataggatggtcggggaaggctctctgaaaagacggtgtttccactaaggcttagagagggggaaggaatcaagctggacccacatccatgggaagaacatctcagaggtagcagcaagtgcataggcctcaggttaggaacaaatgtgacctgttggagaaactggaaggatgtcaacatgggttgaatggagtaagagggtaatgaggaggactgccctagatggagtcaaaggtttgggtttaaacagcagaacaaacctattccatatctcagattattttgtctctctctttttttaaaaaaaaaaaaaattgttttccagtattgtttttctcctgtttcaccttattcaagcacctgctctagttcccattatttttttttaaaaattgctctctgttcatgtggaccttttaattcaagaaatgtttgagcattatatgccaagccctgacgtaggcaaggcagggatttgaaagatgtgaagtgatgtgtctgtgggccttagaaacacgtagctttgaattccgaaagtgagaattaagttgaccttgcagaaatgaattgcaggttaggtggtggtaagtctctaaagaagattcatgtgggaccttttcaaataattctgttctccagtcaattttaaaccaccctgcgtcccagcaaggacagtttatggctttgttcacatcatagatttagaaatcaagacctaagaaaggtcacaccattaaataaatgttcaacactccgggaaaaatgggatgttaataacaaattctcagttgagtgacattgacttgctacttttgtaacagctactttggtttgcatttgtaaaacctaaaaaaaatttttttctttacttttgttggagaaaagggaagtttttgacctgagcattttctcacttcagagaattgaataagggaagcgtgcattgattaatattcttgggggtgctagaaatgtatctgaaaacctctccagtctagtgtttctcaaattttaatgtgcttaaagatatctggagctgtgctgtgaagtcactaggcacatgtgacttctcagtacttctgaatacttgaaatgtagctagatgaaattgaggcatatctctaaaatgcacacatttgaagagttactatgaaaataaatgtaaaatatcttgacaatttttgtatcaattattcaatagaataaacttttgatatattgggttaaattcaatatattatttaatcaatttcatttatttgttttcactttttaaataaaatgcagctattagaaaatttaaaatcgtatatatcttacattatgtttttattttaccctattactctaagaagacttctgtgtccagccatgatgctacaactgataccaggttggtcctcagactgaaagcaatgaaatacctaaggctactctttttaagcattgatcaaaaggcagctctgtgatcttggagagaagggagacacctaaggtgagcctcatgaaagctctggctttctgtccaggagcccttttctgctgcaaggcaggtagttggtgccaagcactgtgacgttctcactgagctgaagatttgaagagtagagttctgggattctgaagtggaatcgttttggggtcaggtgccacaaaagaggaatatgtgcagggggaatgctcataagtctgcatggaattttacagctggtccttggctgactatccatgtccagggtgacagacttcaccggagatcagagatcagttgatgcagtgctctgagctagatggtaaaacaagaatctgtgcagtgctggggcacttgggatccaagcaacccagagttgggagaccttatgcaacaccttgtgcaatcaagtggaaaccccagaatgcccatgctgaggactaagttccagtttcactagaataagaccatgcctgttgactaagttcaagatggaaacagacccacctgacaaaggataaaacctagcacaacaggatcaaatgacactctagtcatttaaccacttgcatgaacaaaattcagcacctttcagaagaaaacattattagcacaatctggatttctataatgcattatgcatcttgttcaacataccacaaaatttattaaacatatgaataaacaggatcatgtgacctatagcaagatacaaaataaagcaaacagaaacagaccctgatgtgtcatggatattagaataatcagaaatgactttaaaaccacaattgtaaatatgttgaagacttaaagagaagattgtgttacttaaatgaataaacaagggatcccaggaaaaaaaatggaagtcataaaaaggaatcaaatggaaagtttagaaaggaaatgtaaaatatttgaaataagcaaggcacttgaacagtttaacagtagattgaagactatagaagaaaggactagtgaatttgaagacagaacagaaaattattcaatctgaagaatacaaaaggaaacaaaggtagtaaaataaacagagtcagagatctgtgggagagtatcaagtagtctgatatatctgtgattgaaagcatagaggtagggaggagagagagaataggatagaaaaaacagttgaagtaagcggtgaaaattttccaaagttaatgaaaaacatccatttacaggtccaagaagattagtagatcaggttaaatacaggtagaattaaaaaaaaaaaaaagaactaaactcagacatcagtcatattgacgaaaaaaaaaaaccatagataatattgaaaacagccagtgaaaaaggaaatataaaatgcaggggatgaatggtacaaacagtaactgatttctcatagaaactgtggaggccagaagacaatcatatgacatctttaaagttcagaaagaaacaaaacaaaacactgtcaacacagaattgtatgactggcaaaaatattcttaaaaattaggtgaaataaacacattttcatctaaaggacagtagagggaatgtgtcagcagcacaagaaatgcaagggacatgatcaaatatgaaaggaaatgagagcagaaggaagctctgatataatgaagtaaaaatagttgaaatggtagacacataggtctaccataggtatattaatgtatatgctttcacttctcttaatttatttggggaaaacagatagtttacaataaaaatgatacagttttattcttgggtttgttaagtatacacatgtaagatttatgactactgtgcaaatgtatgatgctgagtaggaaatacagttttattatagtttttatattttaacagaagccacataatatgaactgtaaaaagattctgataagttatggatacatattgtttatcctaccatgcctaaaaatgaatagaatatagctttaaaaataaatgtatatgtaatgcaaaaaggatttgcttaataaaaaagaagtcaagaaataaggaataaaatgaaacatatggatgtgaaaactagaaggcaaaagcttgaaagacaaccatagaaataatttcaccaagtgcaagtggactaaacactccacttaaagagcagagattgtcagactataataaaaagcaagaatccgttatttgctgactacaagagactcgtcttaaatacagagacacagttagattgagtaaaagagtggaaaactatatcccatatgaatagtaaggataagaaagctggtgtgtctgtattactgtcaaagttgacttcaggggaagaagtattagcaaagtggaaaagagacatttcagaatgatcaaatggttaattcatgaggaagatataacagccctaaatatgtatgctgctaataaacagcttcaaaatacatcaagcagaagttgacaaaactaaagccagtaatagataaatctgcagtcatagttgtagacaaatttgcaatcaacaactctctctgattgaaaaaacattcataaccagatcagcagtgatgtatgcactgatgtggatgaatctcatatacattataaagagcgtaagaggccagataggcatgcatactctatgtttccatttatatgatgctcaagagtagaaaaaacaaatttatggtgagaaagttcagaacactcattcctttagagctttgggttctgactaggaaggggcaccagaggactacctagtgtgatggaaatactctgtgtttgatcggagtgttagttatatgtgtgtacacatttatcaaaagtctttaaatctttattagcctaagccccatgtattgccacttgtttttgtaaacaaaatgttattggtactttgctgtactgatttatctacgtattgtcaaaggctgcttttgcactaaggtaacagttgagtagtggagatagagactatggcagaaaaaacctaaaatatttatgatctagccctttctagaaagcttactaccccttgctctagagtcacttatttaaatgcagcttctgaaagtcaccctctaagattctgatccagaacatctggaacagagggaagcatctccaatctattccactccccagatgactctcaagtttataaaactgtgtggacagaagttgcggaattgctcctttcaagattcaccatatcaacatagtagctactctctttggtcataaaggtattttactgactaatctcattgaatcactctggagttataaaagcccatttcctccccactggccttccttggaaagtgagaaaaattccttctcatcatagttatgtaatcatccttcataaatgtggagaggctcacatgtgctgctggtggtaacacattctcctgccactctctggctctctgtaggcggctgtttgagaggttaaagataggatgaaggaaaaattcacaaaacactttgtatgcacgtctggcggataatgacacttaagaagctttgcttaaaactgatctgccttcgtgatgatttgagcttgctctttaattagcttttaggagcatatattgtttagtatgattattttattttgccaaatagaagcttaacacgctttagttcacaaaggagcgagatctactttataccagcttttaacgaccaattgagagagaagaaaatgtctgactgccctggaacctttttccccatgggtggtatgtgactttaagatttcacgatcatgggggacactttcggcagcaacagcaatgctcagcaagtattcccttggctcttctctatttccagccccctggcagttaggtggagctctgtgactagttttgctcactgaaatgtgtgacttgtccattgtttcttctagcatagaatcatgcgaatgcatgatgcagttaccacagcatgtagataccacagatacggttaccacaggtgtgacatgaagcagcttgaattcctgagctagttttactgagcaggaaattgatgtttgttgcgttcatttatcgaagtcttggagtcacttgttagtatggtatagccttctctttcctgaccagtacggtacctactgccataagttcagttactcactggggaacatagtccaggagtacacgtgaagctagtaaaaaggcaccatttcaaattagcgaaggtggcatggactgtgagttaacagaggaaggaaaagtgactgtatatttgggaggaaaaagtgagatctctttcttcaactatgtaaaaataagttatatcccagcactttgggaggctgaggcaggcggatcagtaggtcaggagttcaagaccagcctggccaacataggaaaatcctgtctctactaaaaataccaaaattagctgggcatggtggcgcatgcctgtagtcccagctactcacttgaacccaggaggcagaggtcgcagtgagccgagatcatgccactgcactccatcctgggcaacagaacgagactctgtctcaaaaaaaaaaaaaagaaaagaaaaaaaagactattgcttttcaaaaggtctctgctgtgcattatgttgtgtaatttttttttttttctgagagactgcctcaaaggatgcaagttattcgtctccatgtcattttaaaaatgtcttctctggaggtatctggatggaagagaaaacttctgtgatgctggggctcaattctcttggggctctctataagacaggccattatatcaattgctacatctagcatctcctgtgctgacaaaagtcccctgattgctccactgccctgcagagttgattgtgctatcttcctcgcttgcctgatactggcttccacgttgctctctctagcatgtggacttcagaggcagagcctgcgttcttcatttttagtgcctatcaggcatgtggctggcactgaacacagggttctgaatgaataaataaatgaaatgcttctaccacttacattccctgcctcttgggatggcaccatgcccagtgcaccaccctgatttaagttagtgtcagtcaaccctgccttgattcctgcgatcacgctatgtttactgttacccctccccattagttctttcactgaagtcagggaagatctgtttaaaatccatatcttatttcactccctacctaaaaccctttggtggcttcccattgctctttgaataaaggcccaagtctttaatgtgccacataggacgccatctctgcatcctcaccttgctcacacctggtagtcaggaaagatttattccttacagttgctgaaacacaccctggtctatcctgccacagggtctttgcctgtgctgtgcttcatgcctcatgtgccccaagcaatagtacacacacacacacgtttgcttacctagtctacttctaaattactgtttagaccccagctcaaattaggggacattcctcttttatataatttgtaatttctttcttttctttttttttttggaattggagtctcattctgtcacccagggtcaagtgcagtggcgcagtctcggttcagtgcaacctctgcctcctgggttcaagtgattctcctgcctcagccccccaggtaactgagattacagatgtatgccaccatgcccagctaagttttgtatttttaggagagacagggtttcaccatgttggccaggctggtctcgaactcctgacctcaggtgatccacccacctcagcctcccaaagtgttgggattacaggcgtgagccaccacacccagcctaatttctttcttatagtattcagcaccccttgtttgcagcagatattgtggttgcagttttacgtatatttttacggttattggattcaggtctgcaagcacaaaagaggatttgtctggtttcagtgtaatcttgcaccccaagaaccgattacaggatctgatggatatccactcaacaaataatcttgtgtaaatgaatgtcttgttaggggtattgtactagttccctgccatccagggatgcatagtaaatctgcctgatcctgtgagctcggggaaacctaaagctttctgcgggagtggtaggtaccaaagacatgacattagttctgccctactcagaaggtatgggctgggacaggcagtgagggggtgaaggagactaaccgtgaactgtcagtgccccct[136 bp omitted]aactcagagtatttcttatgtgaggggtccattctctagcatcttaccccaggcaggccattttttttttattattatactttaagttctagggtacatatgcacaacgtgcagggttgttacatatgtatgcatgtgccatgttggtgtgctgcacccattaactcatcgtttaacattaggtatatctccaactgctgtccgtcccccctcccctgaccccactacaggccccggtgtatgatgttccccttcctgtgtccaagtgttctcgttgttcaattcccacctgtgagtgagaacatgtggtgtttggtattttgtccttgcgatagtttgctgagaatgatggttatggtagtaggttttcagaagccatgcttcagttctgactggctaagcattcagaaatgggtcctaaacagcaaaatatagatggcattccaatgcacccacagaagaggttttcagctgcagaacaggcattctgagttaaaatatctggttgttttctattggaaagcattggctgtactttgaaactctttaggcttcattctgataagagaatgagatgacaaggtaccatagaattcagtgcaggtattattattatttacattttgcatttagcttgttttaatgaggaagagtggtgggagtgtataaaattttgccacttgtcctgaatcccatcatcattttgaggcaaattggagggatcacagattcaacagggtcaggtgtgaatatggggggtattcattggatatttgaatgaaaacattggtctgtttatttagggtttaaaagtatgacttaaatcattgcatttaagtgtaggtaaatcagaatgtctgaaaaaaaaccatgaacactaatagttaatggaacaatgactaatcataaggaataaaaagtgggagtagatttaaacaacaaaaatctcaagtgtggctgaaggtggcaggggaattcctggagatggcactcgtttcgactttttttttttttttttttttttttttgagacacagtcttgctctgtcgcccaggctggagtgcagtggcacgatctcagctcactgtaccctctgcctcccaggctcaagtgattctcctgcctcagcctccccagtagctgggagtataggtgcccgccaccatacccagctaatttttgtatttttagtagagatgggttttcaccatgtcggccaggctggtctcgaactcctgacctcaagtgatctgcttgccttggcctcccaacgtgctgggattacaggcttgagcctctgtgcctggcctgttttgacctttttgccattgactttaggtactttgttagaccattgctaagctcgcgatgataacacctattagaggaagtcttctgaaagtaagacctggagattcggaggcgatgtgtacttgcttccccagcagtccaaggtgtatgtcctgccctcctccggcagggccactaccatgctggctccccttggtttaggcttgactttgcctttgatacaaccttcccccaaggcaccctgtaatcgcagttgagccgtattccagatacgtgtgagccatatgtctcaggtgttgcagagtaggaaacaagttgagacatactgaggcaattacagaaaaaaagaaagcatggagaattgcggtgataagggcttacgcttcattttttatgctgtctcttttctgaccatattttagatttcctagaaactacccattattatgaatgcctgagttctgtgcatttcttcagagctcaagtctaaactaatttaatgtaaattatacatttgcaagtaatattccagaaaaacctttatggggcccacaaagacaaaatgcacaaaaggaaatgatgatgtgttttattcataaggaagcatttctcttcaaaattcttctacagccccccaaaatacctaatgcatcacaagccgacatttgtactgctggctttccatacacagagaagtactgttccttttaatcaagtaagtttattttgctgtgaaaccctttgtataatattgaaaaatagttgtgttccttggaagctatttcagttttctgaaatgatcatttttaatcagtctcctagcaaaacaatttaccaagcagtggaggataacgaaccataaagtttaatttgccttttttaattgagttgttaattatcacccctccaccgctggaaactcccaacttgcttttttgttttgcttctgatccgagacgttttcaagaatctaatctatcatatttcctctgtccaggtactttcatgaatcacatcaataggtgattattttctaaatctgttaaagcttccacagttgcgtacaaattttgtcagtggtaaataattagatagaaaacatccagtggtggtaagttgataaagatatctgccatttattgaattcctactatgtgccagatgctgatctaacttcttaacatatattatttatctttcacagcatttttgtttgttttgttttgagatggagttttgctcttatcgcccagggtggagtgtagtggcgtgatcccggctcactgcagctgccttctcccaggttcaagtgattctcctgcctcagtttcctgagtagctgggattacaggcactggccaccacgcctgggtaattttttgtgtttttagtagacacggggtttcaccatgttggtcaggctggtctcgagctcctgacctcaggtgatccgcccacctcggcctcccaaagtgctgggattataggtgtgaggcactgcgcctggtcatttttttttttttttttttttttttttgacagggtctgactctgttgcccagactagagtgaagtgacacaatcatggcttactacagcctcaacttctggggctcaagtaatcctgccacctcagcctctcaagtagttggatgtatgcaccatcacacctggctaatttttaaaattttttgtagagacaggttcccactatgttgtccaggctgctcttgaaactccggggctccagtaatcctcctgcctcaatctcccaaagtgttgggatcacagacatgaacccgtacaccaggccttcacagcattttgaggtacaaacagttatctccattttatatgcaactaaactgaggttcagttatgttaagtaccttttccatcacaatccaacttatcaggactggagcaacgcttcaatcctaggtggtctggctagtggcctcacaggttatttgtttaaccctaagctgtatttttgagatccctgatgtcaaacaaacctgcatttgaattctagttctatcgttaatattgatattaaattaacagaatatgacttagggcccatttgatgggtgtgcggtctgggcccctgcccagccacaccctgcacttggtttgatgttctgctgttgcctttctggcaactctaaatcattttgaacaagggggccccatgtttttattttgtattgggtcatatgtaacataggtagccagttccaataccattattgttttaacatctttagaggctcataaggctgaagtcaacgtgtcagcctggttgggttcacatatggtggcttaactggtatagatctacttccctgctcatatggtaacattcagttccttgcagtcataggatttgtggcatgtttgcctttttaaagccaggaaggggagagagaacgaccagggcaaatctgctgggaagatggaatcttatgtcagataacataataataggagcaccatggtggctcacacctgtattcccagcactttcggaggctgaggcggacagatcacgaggtcaggagatcgacaccatcctggctaacatggtgaaaccccgtctctactgaaaatacaaaaaattagcaagggttggtggcaggcacctgtagtcccaggtacttgggaggctgaggcaggagaatcgctggaacccaggacacagaggttgcagtgagccgagattgcgccgctgcactccagcctgggcgacagagtgaggctccgtctcaaataaataaatacgtaaaagagcagcatccaatcaccttcgctatattttattggttagaagcaaattacaggacttgcccacactgaagaggagggagtcatacaaatgtgtgaacatcaggaggcagagattgtggggcaccatcttgaagtctgttacctgcaattattattattactatatacagttattagtgttgtttttattaccgctattgttattgatagcagttctatagagtactgtgtcccaggctctgctgtgtgagctttatgtgaattaaagctttctgtgttcagcagggaccatggtcctgaggactgaatccaaggacatcccctctctgcccactgaaatcagtagttttcaggccaactaagcatgaggcaactgttattttcctgagtgatacgatcgtttcaggaagtataaggaggtggaaacacagaattctgcatcacacagaccaaggtgaggtcccaactctgctgctttctggctgtgtggtcttgcccaagtcactttctccatgtgggatgttccaggagacttttgaccacccgctgcaagagaaatctcttacaacctgcccattcagcacagttcagcctgaagagagtcatgtgtttgtatttaagatactattaccctgctcaatcccaagagcccactggtctcaggctctgcatggtgtttgaaacaaaaaaacacaatgaagaaatggaaaagttatcccccaaattgtcagcacccatgtaactgctttctcctctcctctgtgattgtccatgaatatagattggcttggccatgccatcttttctctactagcctctttcttgctctcttcctcactctttctgtttcttggtcgtttttttcttgatttctccttatgtatctgtttttgtttctccttctcctgtcctgttccccatttttatccaaatgccatgtcagtgattctcccttctcaggaggaaggaagcagaaaagggtggacaaaggaaataattgaatagaattccatcagtctctcttagcaggtgtatctctgaagctcttcaaagatggtcttgatgagagcagaggaaggaactgctcctctcaagattcagctggaaaaaatacggaatattgtgttaatttgtcttaccaaatgctcttctccccacgttttccctttgatttctctgaatgtttgggaggcatgcattttgctgcagaagagaatcaagtcttcttacaccatctttgttaagatactactgtctgataattcgtaaacttctaaggttttttttccactggaaatgacttttttttttttttttcttttgagacggagtttcatgcttctcacccaggctggagtgcagtgactcaatcttggctcactgcagcctccacctcctgggttcaagcgattgtcctgcttcagccccatgagtagctgggattacaggcatgtgccatcatgcatggctaattttttaatattttttttgtagacacgaggtcttgctgtgttggccaggctagcctcgaattcctggattgaagtgatccacccatcttggcctcccaaactgctgggattacaggtgtgagcccctgtgcccagccagaaatgcttctactttctcctgtagggtggcctgtagcaggatcatccattcacattcccaagtatcctctgttcattcacctgggcaatgagaggagcaacaattaagccagaaaagatttgctgcctccctgtcttgatcccaactccttccctcctgtctgtgtaacttggatctcttacttgtcccctttgtcaaggatagagtcaatcccattccttctagtagatcttcccttctggcccaggagtacctcatcctataagcaaaacatctttagcatctttcatttcttcaagctgtgtttccttctcacttctgaaaaaagagcaatctgtggtttggtttcttatctctggtcacccatttactacccttttaatctgagtgctgtgcaaataaccatctcacaggtgaccaagggacactccagtggtcaatgtgtagtctcagctcgtattctccccaagctctctgcagcgtcagaggacactgacccacactgtgacttgactctctgccctcccacattgttgtgagactggagctctgcgtcattttcatcctcttaattctctgtgtccatccccatgtcttctctctcaggcacaggctaaatggaggtggtgctcctgaacttgaccctcctttgtctttttgcatttccctgcagtaccttagcccatcaccatggccgctgcttttggagcaccttctaaatgtcagcctcttttctcagtgccctccatatgtaaacccttctaatcctccctaacactttatgagataaaaatgagggttgttcttttacaagggcgatacggaagagctgagaggctattcctttctttcagatctctgggcataaccctgactgctctcttagattgtctttgatttctgcttgtcgcttgtctcctccccctgggttatctgttagggaccacactcaaaaccaaactcacctccatttctcttccaactatgttcatcctctgcgtcctgtggttttgttcatatactgctctaagttccattcaacacttcctacatcatttttgtgacttcctgtctttccctgcttgtccaatccaccactaagctgtgtttatttcactcccaaatattttcctttctaatttcttccaaattccaaaatattcttttcagccctctttaattctcttactgtaatattacaataagtttcttttaaaattaatttcatttttctccattgtgtaattattgtatgctgatctatttggagaaaaggtgaaagaactcttttttaaaaatctgtaatctcagcacactttgggagggtgaggcaggcataacacttgaggtcaggagttcaagaccaacctgaccaacatggtgaaaccccatctctactaaaaatataaaaattagccaggtatggtggctcatgcctgtagtcccagctgctcgggaggctgaggcagaagaatggtttcaacctgggaggtggaggttgcagtgagctgagatcatgccactgcagtccagcctgggtgagctcaaaagaaaaaaaaaatctataatctcatcacctggaatactgcttcttgcttctggcctgtcttacttctcgatccctgattaatttctctaaaaaatcagcttttctatataacccccttcagagatccttgttgctgctgctgcaaaaaaaaaaaaaaaaaaaaaaaaaaatccaactcttttttttttttttggagacggagtcttgctctgtcacccaggctggagtgaaatggcgtgatcttggctcactgcaagctccacctcctgagttcacgccattctcctgtctcagcctcccgagtagctgggactacaggcgcccgcctccgcacgtggctaattttttgtatttttagtagagatggggtttcaccatgttagccaggatggtctcgatctcctgaccttgtgattcgcccgcctcggcctcccaaagcgctgggattacaggcgtgagccaccatgcctggccaaaaaaatccaactctttagaaaaacactcagaacattccaagttcccctagaagataactttcaggaaggcaatggctctgccttttgaccagcacatagatgaatgccagaaacagagtgagtactgattggttgaatgaatgagtgaatgaaggaatgagtgaatgaggaatccatttaccttctctaatctctggcttcatctagaccaaattactgccttctcctaaattgttccatattttccacttcttctcacttactgttagtagctgagatctcctcctgtccatctcctttttgtttgtagatcgtctctgtcattcaagactcaactcattcttcggggcttcctcaaaattcccctgatgttctctgactgcaaggagctcttccctctcttccctcctctgttactcctgaagcagtttttagttttcattctaattcctttctcccagctcctgagcaaggtaatagtattttttcagctcggctcttggtagatatttaatatttgttaagtgcatgagttcatgaaataaatatttgggataatggagctgaagttaaaaccagtaagctccacttacttctgtgtctgggccacactttgtccaaagatttccctcttaacgtttttgtttacaaatgctcttcaggaataacttgtaagagaaaggagctgtcattgagtgccttgaaaagtggaattgcatgtttctatggaaacagagttgagagctgagttttctgtacatgatgttttaatgaaaacatattcttagccattatagatgggtttgtgtaccagatgagaagtgctttatcttaattgaccattatgttcataagtcagattgatggtctcaagtattatttcatcaaatcacaatgcattactgtggtttcctttcaggaggtgatcccaatgctcacaaaatgaaggctgtccttgtttgtggaggaaaatgtttctatagacttgctgttcttccctttgctattgagaagtggcctctttatttatagctaaaggacacttaccataagcatccaagtgattctgttctctcttggaggatgataattgccccaaatcatgcatgtatcttatatcatatgaacaattgttaagcagttttagggactccaggatggtggtagcagcggtagtggtggtggtgatgtgggaaagctcaaagtttgctcccaaactcttaagtagaagactacctgtgcacctgatacttttgcttttcacttgtgtgtttgttggttttgttttttagagacagggtcttgctcttttgcctaggctggagtacagtggtgcattcactgctcactgcagcctcaaactcctgggctcaagcgatcttcccacatcagtgtcctcagtagctgggactgcaggtgtgcaacaccatactcagctatatatatatatatatatatatctctacctacctacctatgttgtccaggctggtttcgaactcctggcctccagtgatcctcttgcctcagcctcccaaaatgttgggattacaggtgtgagccactgtgtgtggtcacacctaccatttttggtttgtactagttctgaagcatgtattcctatagcatggatcaacaaattagactctacagattatatccattagaatgccatggactataagtgctgggatcataattagaaaattattctctttttaattttctgttaatgataatttattaggcatattgttcctatccagagatgggcttcctgcttcagtttgtggcaaatttagggtaccattttgcttacctcttggagatctcttttaatgcagagatctaacacatcattctcctcaagtaccttttaataggaaatttcccaataaacctattaaaagcataatgaaaacctcattcagtcttctgtcaggctttggagctataagtggcttctaatttgcacaagatcggaatagcattgaagaattacagtaactaagtgaaacatgcattggattttcaattttctgatagcatcccatgtaatttcttgtaatgcatctgtagccaagggaggtgacacatgtcaaggctcacgctgcagcttctgcccacatcagtcttccgtggagaagcacgatgctgtcagcttttctcatgagcaggggccagataggtgtctttgtttagccttgatggatattccattatgcacagtcctctgagcaatagccacataatttaaaaacagctcagatagatgtttttgatgcttgacatttgacttcacatatttattggaacaaactgtgaatcatccctcttatgcaagtgcttgacagaatagtttgtccacctgtggtctgttgtacctgtggagtctatttgtattctggaaaatgaattccctctaggaaaagccaagagaagtcctggacatcatggctacaagccagtgagataagaccctgcattttattttttttaatcatagtatctcttttttttttaactttaaagttcatgggcacaagtgcaggtttgttacacaggtaaacttgtgtcatgggggtttgttgtaaagataatttcatcacctaggtattaagcctactgcccattagttatatttcctgatcctctcccatttcccaccctccaccctaggaaaggccctgggtgtgttgttcccctctatgtgtccatgcattctcatcatttagctcccacttataagtgagagcatgcagtatttggttttctgttcctccattagtttgctaaggataaaggcctccaactccatccatgtccctgcaaaagacacaatcttgttttttttaatggctgcatagtattccatggtgtatatgtaccatattttctttattccatctgtcattgatgggcatttaggttgattccatgtctttgctattgtgaatagtgctacagtgaacatatgtgtgcgtgtgtctttgtattataatgatttcttttttggggagtatatacccagtaatgggattgctgaaaatcctatatttcctttggcatatttcattttatccagatgaaattatccactttccctcttagagagcctaaatgtttgtttttaacctgaaagagggagtctcttgtaccttacctgtagtattttcaatgtttatggcatacgtccattatttaaaacctcaggaggagaaaagccagtagtatatttaaaaatagactaatcacagtttgcaaaggaaaaaaagaaaaaagaagccaaccagactttgtaatcattaaaataattaatggtgttgcttttcttgtatgtggccttgacaagactctctcactcctggggcaggtattttgactgatttttcacctgactgaggatgaatttgcactaatccagctctatactctcccaggatctcctttgtgaccaaaggcatttatttgcaaggtagcagtgtggaggttaagatgataatctaaggccagagacagcgtccagctaattggctttacatggggatccaagctgtgttctaactatggtgcttacgtagcctgaagcacctttctgaccctttatatcaccccgaaaacagcaaacatttgttgaattcccatgggtctggtgctgtgggagggggtggaggcaggagaagccaggagagactcagcttggcacagcaggagcttcttgggtgctcacagcagataggaatccacgcttctttttaaaatacactgaagaaaatattatttgagtctttccatttttagctgttcaatgggtgataatggaaagtaagtccagattagcctccaaaattgtagatcagctgttttcaacctcaacactattgacatttggggctagatgattttcactgtgggagctgtcctgtacattgtaggatggttggcagccgtagatgctggtaaaaccccctctagttatgacaaccaaagagtgccttggctgagaacccctcctctggatggcttcccagtggctactgatactggcattttctgcttttagagagagtaggtgactgttttcacaagtgtaaaatataaagtccttaggacgatgctgggcatggaataggattcaaaagtaaaagggcaaacttttcactatactgaatcaagctgttatttttttgaaagtgatatcatcatctttgctgttcattatacctttactgaaccttccggagtgtccctgtcttaataaagaagtgagcatcgtctaagtactgttttgagctttaagtggcgattcaagctccacctcgttgcagaaacatgggcagtaaaactgttagtatctgagaggcatcaagaaatggtagacgattctgaagcatggcatcacgtggctcttcatgtttatctcgccacaacatccttagctcctcctcctcccactggtcgtgcattaaagcttcaccaccccaagggccatctgtagactcactgcatcagcatcgccttgggagcttgttagagatacagagactcaggccccagcttccacccacggaatcagaatttgcatggatagagagccagagaaatactttgttgaagggccttttccatcccactccaactgttacctaaaaggacctcttcagagcctcctttcatagatattctgtcttgctggctgcatgctctcttagcgtcctctgctggccgctgttgatggtggtgattgtttttcatacttttccttccttaccattctgtgctctcataagtacaggccagttttgcttttctgtgatcccaagctatgacctaacacaaccctttcccatacagatccagtcccaagcacccgggagcattccagggtccctggacatggttctgcaaaactcctagctactcagcatgccagaattctaattcactcatgggtcaaagccagagaggctgtgtgtccacctctacacatatgtacccatgttgaatttaaaggtccccaataggagctacctcaaaaacacccaacaattaaaactagaggggatgggggcaagaaagatgaaaagaaattgattttcaagatgccatcaaggttggggaaaaaaagaaaaaaacaaggaatggaagggacatcagacttaatgcctccttgaacatgttacgttcaactcaaaagcctccccagtcctcgcaccaaaatctttcccaagtttgtaattggtgtcaccatccactcagttgctgaaattaaaacctaggcattatgattgattccttctttctcctttcagtctatcaacaaattgtatgtttctaccttcaaaataagaatctcaaatccccccacttctagtcatctccattgctatgaccttgccttcagtcccagctctcaagggtctcctacagccttctcctaaattgatcttcctgatccactgttgccattctcagaccctccctttggcagaagccaaaggctggtttctaaactggcagtgtagactgggcacggtggctcaagcctgtaatcccagcacttcgggaggccgaggcgggtggatcacctgaggtcaggagttcgacaccagcccggcaaacatggtgaaacccgtctctactaaaatacagaaattagccgagtgtggtggcatgtacctgtaatcccagctacttgggaggctgaggcaggggaattgcttgaatctgggaggtagaggttgcagtgagccaagatagcgccactgcactccagcctgggcgacggagtgagactccgtctcaaaataagcaaacaaacaaactgccaatgtgctggtcatacttccttgttcattttgtttcacttttctatttctcaaactcctcaagctcattctagtcttagaattttgttctgctcccacctcctggaacactcatcccccagctactggcatggatggctcattcttctttgagtctcaggttgaatctcaccaccctcaaggcaggaaaaccttatcaaattaggaccaataagagtcatgttcctggcacctaggtagtagatgaatcccctttgactaaggctacctcaccgagtgactgtgttctctaaaatgctggtgatgtagaacaggcaggacacagttagcatgggagacccagctagaaaaagctggagagatccagagtaaagttcatttgccatacttcgctttatctaatagtgagaaagattgcctatcaattaaaaccacaagggtggagtggggatgttttccctagagatttgaagtagtttcatctaatgtggagcagttttagaattcaataatgcaatcaggttttagtatttccacccccctccctgccacgtaatgattcatgtgccttgaaattttttcattaaaaaattccaaggctcacaacgtagaagaaaaaaaagaaaagggggcctcacacctcatttgttcagccatctcatcgaggccccaaatgtagatcattgaaatggagccttggaattttaaatcaagttttactttgcaaatttaatgaaatgcaaacaaatacttagcagttctaaagggcatgaagtcattaaggtttctcattttgttaggcgctttgggggcctccttaatttttggagtaaaatcaattaagttctttgtgtgtgtatgtgtgtgtgtgcgcgcgcgtgcgcggatgtgtgtggctgcttgtgtagccagtaaatagacgaggtgtactttggatttgaatgtctgttgttccctttaccagatgtgtgtccttgggcaagtaacttaatcttgcctcctatgtaacatgaggaacattgaagttttgctaggaggattcattgcagacgcacaggtttctgttcttagaagtacccgtgtatgctttaatgctttgcttttaccatcttgaaattcttagtaattattccgtgatgggacatgcattttcatttttacataaggccccagaaattctgcagctggtgctgactgggtgaaataatgtgagtaaggtgcctgtgagcatcccttagatgaggcagatgctagatatgcattgggtctttttcttccaggtttgaatagctgtgtcttgctgctttcctgggttgggcaaaatgtagaatactgacactttatacagccacccccataagagatgcaggttatctgttgattacctttaagactggagaaagatagtcgattctcttacctgcactttagcaatgttgggaggatagaacttatttggagaacgtttatggcctaatagcttggtaaaatgtgaatcttcatgaaagtggtttgccaactctaaattgctatacaaataagtcctgattatgtgcactgaacaaaaggcttattgagcagtaactgattcagatggaggtaagaaaatatgccaaactcttaggggatcgcagacattcaaaatcatagctcctgaaatgtgagcatttctctgtcaattcagcagatgtagagcgcgattctatgcactgtggggcaaggtgttggaatggtagatgatgaaaaatcatggcttttggtcataggaaattatgtgatgttagcagcctagagctcacagctgaggctgctggaggtaatgctgagaggaagcatatcgtgagaccagagagggttgaagagaggatcttgagatctgtgtgcacctgaggtcctcaattttggattaacagaatccccaggaagtttacccagattgttatgacttttacccagagtgagaaccatcattgattaacacttaaagggcctggcagagaaccaggagagaagagttgaagttgtgaggatctatctcaaggcatgtgtaaacaacagtgcccaggtgagaagtggagctctacttctggaaattctttcctttctgttttccattaaaaaaaaaataagataaaattagtgcctatgttgaccagctctgttctctatgttttccttcccaaatgaaccaaatgaatgctagctcttgcaaggccaacatcacagagaggtgttattcctgtccccctttattttctctgcatattctgtttatttcacccacagcatgacacacttacggaaattatctcattgctggtcctaatgatcttttcccttcctctttccacggctggaatctaaaccgcatgagagctggggaatgggtcttgtttatctatctctctatccctaagagctagatttgtgcctaggacatcagaagcctccacatatttcttgaatgaatgaatgagccagttttcctcacctgagaccatttgcagcatgtcaggttgtcttgacgtgcagctgaattatttacattttccggcaattcattgattgacaccttgggcgccctacatttgtgctagcctcttggtattttttctcccagcttagatgttcctgctgttctccaggatgggtccttcttccttacagattcagaaaggagaatcttctatgaaatctacaagatcctactagaacgtcaggtctgaagggcaggactatgactatggtttccttattcatcatccctccataaatacatatttgctgaatctcttttcctcccttactcttcctgtatatagaagaggaggtggacatctatttggggtgttctcccaagtttgtggccaggcttaaggaaccccgcgacaccatttgttttcaggaa[134 bp omitted]ctgctgcctcagcctcccaagtagctgggattacaggcgcgcttcaccacacccggctaatttttgtatttttagtagagatggggtttcaccatgttggccaggctggtgttgaattcctgacttcaggttatccacctgccttagcctcccaaagtgctggggttacaggagtgagccactgcaactggcctataatcagtcttttatgtcattctccatcttcatgcatttaatagattacagcccaaatatcacaatcgtaattgaaacagatttgtttgttagaagagggggaggtattaatgaggctacacaggcactgctgtgaaccaggaaaactacacagtgtgggtatgagggagtgaagaatacatttatgttttaggtctcacttctttctttgcctgtattaagtagtaagggggagaactaacaaggtacctctgcatttaatggttcttttgcagtttggctgaactgtgtcttgaaatccttgaagagcattactaagatggtatagaagttacttgcttaaaaggagaaaagaaaaagctttaatatagacaactcaatagctgaactactcttgcaatgtgaatagccattccttgggtttctaaatgattttcacacttcccacacttgtttaaatttgtaatatcctttatggttttcctttattggccaggagaagaaaaacaccctgaagatctaggtatccatcaaagctgatggaatacactaataaaatcctgtgtcatattaaaatgtaaaatatatgctggcataatattgtctgagtcaatccaatggaataacataattaatagtggctttgataattaatttataggaggaagaagctgaggacagcttagttctttctgtctctgtattcctcccaccccctcatcttttctcctgctctctgtctttctctctctctctctttttaactagctgctgtttgcttcatccaaatatgcatggaaaagttttaagtggttgttgaaactcccagaggcctgtttacttcaaggtagaagcaggaaagctgccataattcagaaagcagcttctggcatgagatgaaagtcagatcagctcaagttggggtcagaatttagaggccccactggagtgtttatgcttgtatctgtagtccagataagttagtggaagaaattgttccctgtggcaggtcatgaatctaattacactagaaatattactacaagcgcttcattgaaaattgctaagcaatgtatgctatctatggctttcgtaccttcaaatcacatatgatatgtggaacacatcttccacgtgggcccacagacccataactcaagccatggtttctcagcagaaaacagaccccagagagctcctgttcctgaacatctgtctaaaaaaatgccctcttagagatgagagaaacagagaccttacttgaacaaagagagaggagcactgaagtctcaggagctgatcaggaaacacagaaaggaaataagtcgatggttttaagagctagctcagtgccacccatgttgcaatgtaggttctggatctaggcctttttcctgttttatgactattggatatctctcttaaaaggggcatagttattttctgttttttttttttttttgttaattttatgtattttttatttccataggttttgggggaacaagtggtgtttggttacatgagtgagttcttgagtggtgactcctgagactttggtgtacccatcaccagagcagtataccctgaatccgatttgtagaaacactaagcaaaagaagttccagaacagaattaaaactatgcagcattcctatttcctccaataaaaatttataattgacccttgttagcaaaaattttcaacaatggaaacattgagaatattcagtaaaacaaaaaacaaaaccattttgaatattaaatataaaatattgttccttgctaattgaattcttttttaaatatggaaacacacaattgctttttattaccctttcatttttttacattgttttgtatttgttcttatattcaaatgaacaggctattttcaagttaacacacagtcccactccttcctccaagttcccaaagtccattgtacgttttttttttcccccttgggatggagtctccctctgttgcccaggctgaagtatagtggcatgatctcggctcactgcaacctctgcctcccgggttcaagtgattctcctgtctcagccttcctagtagctgggattacaggtgcccaccaccatgcctggctaatttttgtatttttagtagagacagggtttcaccatgttggccaggctggtctcaaactcctgacctcaggtgatctgcccacctcttcctcccaaagtgctgggattacaggtgtgagccaccatgcccggcccattatatcatcttaggcttcgcattcttgtagcttagctctcactgatgagtgagaacatacaatgttttgttttccattcctgaggtaaggtgacctcgttctaattttatcaaatacagtatgtcaagcaacaacacaataaaacaaatgggtatagttatatctggtttgaatagaggctgtgggttcaaaatgaggataagtccagacctcatggaaacctccactggcatagcctggtgattcacacaggaagggttttgaaatcagatgttcctgcgtcataatctcacgctgacgcttactaagcctgtaacatcatgcaagccagttatctctcagcctggacttggtcatctgcaaaatgggtaactgtcacattacttgccttgcaaggttatcaggttggtacaaaagtaattacggtttttgcttttaaaggtaatggcaaagattgcagtcacttttgcaccaagttagtataaagataatggtataagcaaggttatgaataagtattttctatgttgataattctagatcagggtattgtatgacatgtaggcattgtaactgtaaaataactatgacgtaggcagggtattgcatctgaataagccaggtagtgaatctattatcctacaggtagattctttttttctgtaaggtctttgaggtaaggtaggaataaggatagtgggagccagcggtgatgaggatgacaagatggtctaaatcttctccctctctggcattattgctgtttatttccttggagagagaatctactcttggtattggaatcagaagcagggaaactaagggaatgaatatgaatgtcaaagaagaaatgggatgcgggtttgagcaaagaaaatattagttaatgaatgttttaggaaatttgcaatgtctggaaggtaaacgtctttctcattactaatgtgactacaggtcgtactgtgtgttaatttgaaaatagcctgttcatttgaatataagaacaaatacaaaacaatgtaaaaaaatgaaagggtaataaaaagcaattgtgtgtttccatatttgaaaaagaattcaattagcaagcaactatattttatatttaatattcaaaatggttttgttttttgttttactgaatattctcaatgcttccattgttgaaaatttttgctaacaagggtcaattatataaatttttattggaggaaataggaatgctgcatagttttaattctgttctggaacttcttttgtttagtgtttctatatacattttctaggtagaataaaatccattgtacatattttaaaaaggaaaaagtagtccggagtgagtccttcccattgactgctttggacattacaatctgccatctcttcctctggggcatccaggagacaagccctaggagactgagacatggaatggtgatttcataataaaacaagagacaacagggcaattcagtgttcagcgccgtggagctgtgcactgttgaggaacacatcagggcagcctggcccacagatttagaaacagagtgagactagaagggccatctgctgagtaagtagagacctcaagatgtacagcgtgtgttttatgatccggaaggtagattttccccccgttcatgtaaagcacttcaaggacttggtaatgggacaaggagcttttaacctccaggttactggttaagaaatgtcccacatcgatagtgaccagaaggcattgccgtctgctggctgcgcagtggcctatgtaaatgactttaaggtctcaaagcaaaccattatgggccgactttctatcccaccaactcttaactccgagtacaatgacccagactcagactccttgaagtagtccccgtggagcctgatgggaggacggcaggtggctaacagcggcggcttccatgtgggactctgctgtggcaatgtttttttttggaactcacttatttttatagtttaaaagaacacactttatttttcactctggtgagagactttttaattatgtcttttgctgagcatttcaagatggtatcagcatctgacatttgaaatgccttctttgccaggcactctgataagtgcttaacctgtagggtatcatttaatcctccccactcttcgtgagttagaactctgtttcttgttttataaagtaggagactggggcagagaaaaatgaggagatctgcctgaagccacagaagcagggtaggattcaagacctcccctttgtttagctaggattcatgttcatttctttattccatccaattttctaaaacatttttaagaatcagtgtccctttatgtttttcctaatagaggtttctgtgacctcttagcacacatgaactaatgcaggaatgtgcagacactgtccgtcaccttcctcacagttacctctcctgcttcccccacagctaatggaacattgattttgttaaaggattgggaagccatttgtttcacaggggccttttctagccccacccagtgaatcatggttggctttgactgatcgtaaaatgctttgaccaacaataaaacatttccttgccagtgatttgtcttggatgaacatgcccatgtatgtgaagagctcagatggggcatgcccttgagaaggtttcttgatcttcacagagctatagaaaagagaatgcttattttctttcttttggcaaagttgtgtggggagctgttgagtccaacatgtaacagtgagacgaggtggccagcttggccacctgtgggacaatgctgagggttgtggggggatccaagaggacttccctccccacttcccagtggccaactctgccactgacctgagttgttttccttccttgtgtggtagcatgggtgaaaccagagacgtgcttatttcagtccattgggggctcttgtgttactcgtaactgggcattcttgctgaaatgggtagtctgtatactatgtttatttaaatgtattttatttcttattattttaagagacagggtcttcttacgtcacccagactggatggcaggggcatgattatggttcaccatagccccgaactcctgagctcacgtgatcctcccacctttgcttctcaagttgctgggactgtaggtgggcagtgactaattgtttttcgcatttttttgtagagatggggtcttgctatgttgcctaggctgctctctcactcctggtctccagtgatcctccaccatggcctcccaaagcgctgggattagaggtgtgagccaacacccctctaatataaataaatcattttataaattatttataaaaatttatttttatgatttgatttatttatattccctttaaagtgtacaaataaaagagacataaatgtagaggtgatgatacaactttcagtgtacacagcaaacaggtggccaaggtaagcccagaaaccatttgccctacttctctgggcaaatggttgccagatacaacacaggatgcccagctaaatttgaatttcagagagtcaatgaatatttttccttagtatcagtatggcctaaatatttcatgaaggcctacttacaccagtcatttcagttgtttatctgaagtgcaaatttagctagactttctgtatttttatttgctaactgtggtaatcctattctgccaggactacatgctttttatcatttgtcttcctatttttggactcttatttgaaaatactaaatacccagccaccactaacttaagccaaagaagtttatttgtaagcttaatttctaggtgtaatttatatgcatatataaatacaagttatatatatatgcccatatataaaatgcatacataattatattgtaattatatgatgcaaaattgaatgtataggtttaaataatttataggcttatgtaactctgctctctgttatatttcttgccaagtggattttgctaagataattatcagcaatgttagacttatgtcctatcatctttgtgaactccagtgaaaagaaagctaccttttttccaagagttgaaagcaccaagattagatcctattggatggatttaagtcatatgttgattcctaaactaattactatgagcagaaagatgagatatactaattggctgaacctggtcatgtgaccacatttgaagatggaggataatgatacagcaaatcatatccaaaccaatggaaactaggagcggggagattccccgagataaaacccgaacgcttttacaaaatgaaagtggagtggcttctgggcaaccaataatgatgtccactttagtcactaggtatcagacacaatgctggtctgaagaatgtgatgcttgcaactgtccggcggggccttggacttgtctgaatcggtattttgctgaaagtgggtggagggaagtgaaggttctgcatcacaggcgatgcacctacagcaatcagatatttgtgaacaaggctgttttgttctgtgtcagaagttcagtggggttcagcttgttagtcaatagtgaaggaaataatggcagcccgttccagtctcgccgtgcctgtgaggcctcctttgatttttccctcgtaaagaatctcatttgatttttatataaaactcagatttgaattttattggagtacttatacatgattgcctttcagtgaaacttactgtcattttagccgtaatgttctagcaaatggagtggtgttttttagtttcttttaaattgtttcattaagcaaatatttattgaccactgcacatgagttaggcattgcggatgacagagaaaaagtcagacaaaagtccatgtcttggagagcttacctgaagacattttgctgtgtgtatgacagaagtaaacggtccaagtttctgcatttaaatattatgttctctacaattatattgctctgggaaactggggagagggcacgtctgggaatttgaattctaagagagaatagacaggcacctattaaaagtgaagttggttttctagctttttctgactaggtgaaatttctctgtcataggtttgttttttttttttgagacagtctctctctgttgcccaggctggagtacagtagtgcactctcggctcactgcaacctccacctcctgggttcaagcaattctcctgcctcagcctcccaaggagctgggattataggcaccgaccaccatgcccagctaattttttatttttattttttatttttgagatggagtctcattctgtcacctaggctggagttcattggcgtgatctcagctcactgcaacctctgcctcccaggttcaagcgactctcctgcctcggcctcccgagtagatgggtctatagacgcacaccaccacacccagctaatttttgtatttttagtagacacggggtttcaccatgttggccaagttggtcttgaactcctgacctcaggtgatctgcccgcctcggcctcccaaagtgctgggattacaggcgtgagccaccgcacacggcctctgtcataggtttttggggggagaagctcctttcttcttagtggttggaatagttgtgagcaaagaatgctcaaagatgggcattctttgaggacatttgtgttcaccagaggacagcaagtgcttgaaggcagaagccatccagttccagtgcacacagcacagggtctgccctaaatggagaacccaataaagacttgttgaatggaggaaagtttgccttcccctcctgcttttttcactctggccattgaccttcccacgtctcagacagatgaggaaatgtcatgttaatatcaagaagtatgtacagtgaatgtgctcttaacctcatttttctgcagcttcattctatgtttccttaaagatttcgcagggatgtgatttggttccacccattgcccacatgtacaaaaatgacagaagactgacttgaagtgggcatgcaaagtaacattgcttttccaaagtgccaagaggaggatattcggtattaaatcagtatctccttaaatttgtgctgctcttttcttttgccagccttaaggtgctttaataactgtgagacatagtagccaggtgcttcctaagggaacctgagacttacttaaacctcttcccaccacaggtcaatagaatatacctgtgattgttcttaccttcagtgaagatgcttatgccttattgaggcatttactgatacaaaaaaatgccaggccagtctgacatcttaacctaaatctacagggtttataaggtaatgtgtacctgcaggaatattttttcctaaccttaattaaatgcaaggggaacaattgtaataggagtgccattttagggaggaagtaggaggtctgatttatggctgtcaattgttgcctctgtttttttcttaatgtgtatatttgaggtgtatgcaacatgatattgtaggatatatatagatagtaaagtggttatgatagagaagcagattaagatatttatcatctcacaaactttttttctgtgacaaaagcagctaaaatatacttgtctaaaatagggaagtcaaccttgatgcttcacttcccttttgtatctggggcttgctcacctcttggcccctccagcaccatcaccctgggcaaacaccgtcatctttgagtcattaccaccagagcctcatacacagatcctgcatctagattctcctccatccagcccgagtcatgctttaaatgcacgcatcttctcctgtctgttcccagtggctttatcacacaatggttttgtgagaacaaagctggaggtcctcatccttgcttgcaaggctctgcataacctggtacctggcaccactcccatcttgcctcctgcaactgcagtcgttcctctaggagccatccttattccatcccgtcttgggcctttgcacttgctgatctctcttgatcctctcaagatcagctctgttgtcccatgaatgccttaatctcgagtgtcctttcctcagacagccttttctgagattgccctcatcgctctccgcacacgatcctgctttatcatatcatgactagaacattcgccccttgttcatttgtgttctatctctccttcttcctaccgacaatggaatgcgagctccatgagcacagtggtgtttcccagctttattctgcagccctgccccttgaacaggctttaataaatcattgttaaataaataaatggagaagtgatcactggctgggcacagtgactcatgcttgtcatcccagcacttggggaggccgaggcgggcagatcacttgaggtcaggagttggagaccagcctggccaacatggtgaaaccgtgtctgtactaaaaataccaaaattagcttggcatggtggtgcacgcctgtaatcccagctactcagggggctaaggcaggagaatcgcttgagcctgggaggcaaaggttgcagtgagcgaagattgtgccactgcactccagcctgggcgatagagtgagactctgtcttaaaaaaaaaaaaaaaaaggattgattagttcgtcagtaaattatcttactctctctccatcccattggctggggcagctgactaacaaaatagcccacacaagggaagcaggggttttgtcctgcagagaaaacctcatagaatttaacatccgcatccaaacataaacactcaggaaatatgtctggaaaggaattgcatggcatctgcttccttccatggtgactttcaaatgacaaatgcccaacatcatttagggtggtagagcccctttgaaagagctggagctgattgcttctatcatgcccagaaaaagtcattgtcatctacacacacctggcttacatttggagaaaatgagcttctggtttctgtcttgctccaagattgaaatttccgtgctttgtgttactattaccaacagatacttttcttttgtgaagcgtctagccagctccctaatcactgggaacaaactttgagtaggttgaaccaaaggaggtgtcagagtacatgctttccagccaaataaaccttcagaaactgcaggggctggaggccctctcagtccttcacagccaactaagggtacttatttttgaaagttggactttttttcttagttattaaccagcattagctgcaaaagcattataggaaagaaaacgccttttctatgaaggtcagattcacacaatgcagatttccaaagaacaggatttctgtatttttaattgtttggttttggagactgggcgtcactctgtcacccaggctggagtgcagtggtgtcatcttggctcactgcaacttccgccttccaggttcaagcaattcacctgtgtcagcctccctagtagctgggattacaggcacaccactacatccatgtaattcttgtatttttagtagagacggggtttcaccatgttggcaggccagtctcaaactcctggccttatgtgatccacctgcttccgccttccaaactgctgggattactgtcgtgagccactgcacctggcccagatttctgtattttaacaggaagtgccaggcatgcttatggcttgatttttaagtgggtggtgcatctatataaaatgtgacaactattatctgtttaaggaacgaaatgcagggccagtgaaacatagatgactctcagtgaaatactgcagaaggtggttcttccttcacccaacaacagtggtaacagtgtttccaaggaaagaacaactcaagggagacatttaacccccaaagaaagttcataatgttatatgttacaagatgttggtaaaccacacatggaggggaatgggcatacaatgtgcttttgcctttgtgtgtgcgtgtgtttgagatggagtcttgctctgtcacccaggctaaactgtagtgacatgatctcggctcactgcagcctccacctcccaggttcaagcaattctcctgcttcacccaaccgagtagctgggactacaggcgtgcaccaccatgccaggctaatttttgtatttttagtagagacgaggttttgccatgttggtcaggctggtctcgaactcctgacctcaggtgatccacctgcctcaccttcccaaagtgctggggttgcatgtgccaaccactgtgcctatcccacaacgtgcttttgagcaacagcaataactccagacaaaatgagacccagagaaggttaattgtgaatcaccctttagacacagcactgaaggaagggttgtggtgtaagtagatacctagaatgggatgcatattgcctgaaaagataatttctggaaatgatgagactgggataaggccaaggggactcacctggccaaaatacaaatagagtgtttcatacgttacttttgcggggaggtaaagaccagagaatgagtgtcaaggcacttattttttgagaaatgatgaaagatgaacagcttttgggagcatgttaaaacagatttcatctgggaatttcattttgcacaaaggaatcctgtttgagcataagcgattggtaagttcattgttgttatagcccttggttatgctaaatacgttagtagctgaaagtttccaggacttgacaaatcagataaatcatggagtttttcttttctagtttttacctgattttggatgttaatttgttgttcattgacagtgggattttcatgcaaatgttgggtgttctgtaagcctgagaagtctcttggtgtcttagcctcaagatagcagagactttactggttattgttatttgttctttccaaaatgtttccgcagatcatatttttaaataaattgtaaaaccagtgatttgtaaaaatgccaggtcagtctgacactgcaacctaaatcttcagtatttataaggtgatgtgtacctataggaatattttttttgcccaatcttaattaaatgcaaggggaacaattagaaaggcccatatagggaggaaataagaggtccaattcttggttgtcagacgttgcctctgtgttttcttattgagtatatttgaggtttacaatgtgatgttatgggatacatatagtaaggtggttataatagagacacagattaacatattgtcacagagttacatttttgtgacgagagtagttgaaatcttcttatttaacaaaaattgctgatagaattttattaactttagtcctcacgctgtactcaatgttgcctcttttgttgtgttttatattctgtgaccatacgttttgtaacattaatcatcatccaaagactacactgcagaaggaattgtttacttggacattagtctacatatgcaaaatcaggcagatatttgtacttctgtatctttgaattatatgtaatgtcaattgctagatttttaaaaatataagcctgataatactataaataattataaattaaactacatttctgaaagctaactcttcaagtgataggattgttctttgcatacctatttgtatcctgaggaatcttgcatttccaaaatatatatatattagttagaagtgatgttttccacagagttcttttttgcattgttatattgatttttttttttttttgagatgtagtcttgtttcattgcccaggatggagtgcagtggtgctatctcggcccactgcaacctctgcctctcagattcaagcgattctcatgcctcagcctcccaagtagctgggactataggtgtgaaccaccacacctggtaaatttttgttttgttttgtttttttttagtagaaatggagttttgctatttggccgggctggtctcgaatttctgacctctggtgatccaccccccttggccttccaaagtgctggtgtgacccaccgtgcccagcctatatggaaatattttaattgcctgtaaacacactcagtggagctcgttacaagaagactgtcgatgtacttgaaaagtttacttctgcataatgctaaataccatgtcagaaatcacagaatcctacgaagttgaatttttcattaaaggatcataagtaaagtttggggggaaagtgtgcagttcaatagatctcaatatgaaatggcatattattgttatttatatgtatatttaatattatataaaacacttttgttttaacttaagcatttggattctgattctttgaggcgtgattatggttttgtcattcacagcttagctatgtcatctcagataaattaatgaaatgtccaagcctcagctttggcagtttttaagtgggagtaatagtattaatacccacctgacaagattaccctgtagacggaacaagataatgtaaaatgatgaatgaaaggctttacatacagcaagtgcttaataaatgacagctcattatcattattgtttttatatttacttttttttggttgaaaatattaatcttctgaactacccttaccagtgccaaaacaaccgtaaagaaacaatcgtgcagtcctgttatccacgtggcatgagttacagggttcattatactgaagacaataaaaaccaaaaagaaagcagcacctaggaaggagctatttgcagaagtctcactcaaaagagttcaaaatgagagttccaaacctaataaagataacacgtttgccctctggtggacattcattttgagttagaattttctctgctaagactagagatttttcaacctccctaaaatgtcagggtgttgtagctggagtagcaaacagttctgcctgcttcgtttgaattttgtctgataaatgtgcaggtgaacgtctaaacgcacaacatgcatgggcaaatgaaatgttttatggctacagcgtaatgctctcctcatttttgttcagctccttcaggagttaacaattgctaagggttatttacaagaaatctgagctgtctgatcactcaactgtggaaggtaaatgagatttttaaggtgaagggaaaaggagaggcaaatggtaaaatgggccaatgcatgaaaaagagggagacgtcaaacttaggtactggaattgccgggatgttgtcatcaacgatttgatttgatgggaaagggatgcttaatgtttcttctgtgaggtgtgtgcctgtaccacacacatgtacacatacagtggagtggaaagtattcctgcaaagggccgcaattctcagagtgtagtcttttctcttcctactcgaattggtaaaaataaataatcaagactgttttggtggcttctggttccccaagtagaaagcatcttagttggcaattcagtcactgaccttgaaataggacaccagacctattgctaaaacgtcttccacctcacaggccttccctgcctgctgtcctggtgaacttgttgactctatgcacataaggactctctggggtccaaatgacggggaccaagctcgcacacatcattcagcgaataggctggctcagctaaccaaaggttccatgggctcatctagcttaaggtggctgtattccttggggcggggttgggggggaatgaaaataaggtcatcaaggtgtctctctctttctctctgactctctatttctctctccttctccctccttccatcacatatctctgttttctttttccatgttggtttcattctcaggtagacagtcttcgtgtggtgacaagggtgacctgagactccaaacctctgtcttcatcactgcctttgttttcaggaaaaggagagactcttactctgagcataacgccggtccctgaataaggacagcatctctctgtctgtatcataagcccactttcacaccagttacctctttggtgggagtgggttactctgaagagcctcagtcatgtgcccagccccgtggggtttttgttttgttttgttttttttgagatggagtctcactctgttgcccaggatggagtgcagtgcctccatttcggctcactgcaacctccacctcccgggttcaagcaattcttccgcctcagcctcccaagtagctgggactacaggcctgtaccaccacacctagctaattttttttatttttaatagagtcggggtttcactatattggctaggctggtctcaaactcctgacctcatgttctgcctgcctcagcctcccaaagtactgggattacaggcataagccatcctgccctgccttgcctgtgttttgggagtcaaggcgagatgatgagaagggagggtatttgctgacgaatagtggcgttgtgttgctaaaagaagggcaaagggtgttggatgggaagagccgaaacacgcatgcgtgatgttcagggcccttagtccttgttctttttgtctctgcaagtttgccgaagttgctctttgataatctttcttacctttccaaattgcacctaccctttgacgtatagctcaagttgtactttctctgtggactttttctcccagcctggcttcagcttgccttcgattttaagctgagagcacttacctggtgtacccactggctgtttaagtgctaacggtagctcctgctgttattgttatctcttattccagccttctaacattttttccactgtttcattttgttttttgtttaacggttttattactctttgttttggggactgacaaatttttggatgcccatcttatctaacacagtcagtactgcctcttttgatgatagtgagataggaatttcaggagaccaaaagaaagagcttgctcaaatattataacttgccctttagtcacttttaaaatgcaatgtccaaccaaccttttagttcttaatggaactcttgtcagcaatctgcttgaaggtcagcctcatcattcttggatgtggtcctggggcctcagagtgggcattgttcccttagggagtggaggccagaagatgtagggtgccccatagcaggcatctaaggctttgggtgctccaagcactgctccgggatggggtcaaggaggagaagttgcttgtccttttaaaaatttttgcctatgctgcaaagattatgggtcaaagtgaaggtcatttataaactccacccatggcaaaatccaattataaactttaaccttagtgaaatgtcattagagcttggcttggctttatttgggatggagactgacagttttgtctgtgatatattcagggagacatatctattaaagctagtctaacaatgggggcacacgcagatttgcattttaattcgttttccctcagtgctgatatgcggcttatctttcaagaacaggctcacatcaaccctgatatacgttgcttaagaataatgctcataatctattagtttaatctgttcacatgagaaagaaagaagaaatcgtgcatggtgcggagggtttcaggccccagtgggcgattttttggaggatttcccattacaactgttttcaacttgtgcttgttttcctttctctagcttaagtatgaacagcttaaggagaggtcatgtcttccttctacgtagagccaggcaagctcacattacagtcaggctcccaaagatgttggttatatgcagacttctgaacttgggttccagtttcatgatctgcaatgagcctatagcaattcaaccttgaaaatgggttttgatcattaccgattatgtataaaaatgacccatcagaggacccgtcagataacagataatcaatatttttatttttctggaagtaagatcgctgctaagacctttagaactttctgatacctgcaatactttgtgctttttctctcacctctgccactcctgggggagggaaggggtcttttctttgcaaagtgtgtttaatattggaaggagttgtgtttaactctaagagttctatctcactttgcccagtgttctgcattttcactggttctttcacttttttactttttttttttttaaacactctcccagtggattctctctggggtccagtgaccttgatgtttttcgtccagggaagatggctgaggcatcccagcagggagtcaggagtaggaagaaggtctctgtaacagagaagttttggaattgccgtggggtgctacagcatgaatttagagttgggcaaaagtgcctgaaaagcaggccttctcatttcataatgagcgtcatataaaccatgtttatcacttcgtttagccacattcggatttgtagaaaaatggatagaagggatgactccaggcagattagcaaggggattgcattgatcttggggtcattggagtaaagcaaaacatgatcactgacctttagctctagggtcattgacttggtagatggaacttgaaagcaagagtagaactcggcaaatgtggaagttaaagataaaatgtggcctggagagtctaatggaccactaaggattaatgcactttgttatcacgttggggaaagacgagaaggagtggagagaaaagaaaatttcgggatttgaattcttatacatggaagagttcagagaggttatgtccctagaaggctgagatagagaaggaggtttctgatgaaaaaaaaagcttcagccaaattaaatttaaaggagttaattgaacaatgaacgattcctgaatcaggcagcccccagaatcagggcagattcagagagactccagcacagccacgtggtggaagatgtatagacaaaaaaagggaaatgaggtacagaaattagaagtgaggtacagaactgagctagattggttacagctccgcgtttgcctaatttgaacatagtttcaacactcagcagtgtatgagtgattgaggtgcagccactaggattggccaagactcagttgttgttacaggcacatgctcctaagttaggttttcttatttatttatttaggtggagtctccctctatcacccaggctggagtgcagtggtgcaatctcagctcactgcaacctctgccacctgggttcaagtgattctctggcctcagcctcccaagtagctgggattacaggcatgcgccaccacacctgactagtttttgtatttttttttagtagatagggtgttttaccatgttggccaggctggtctcaaatgcctgaccttaagcgatccacccacttcggcctcccaaagtgctagattacaggcatgatcttatcgacctattaagttaggttgcggtttgtccacaaggactcaaatatagaagtggggagtccttctcaggccacatttagtttgctttaacacagctgaattatatgtgtgaggctatggcatgaggaagggtatcatgaagaggttgaagtccatgaggtaatgagagactatgaaagccgtgttcatgtccagtatttgccatttgcttgtttgttttcttacccgctgggttccactgtagtgttaagtcctacgagaccctggtctgtcctgctctctgctctttttccaatgcctttgacagttcttagcatgtaatcaatctgcagtaaacagctgctgaatgagggaattaataaagtcaccaaggaattgtgggctcctcttctgctctgagccccgtggatgcattgttatgcgtaataagtgtgaaatgagcatttgttgattgtattccatgtcaaagcaaaaaataaaaataaaataaatgtcagaatacactcatggtgctattaattatgatgtagagctttttttcaaacttttattttaggctcaggggtgcataagcagtttttttatttaggtaaacccgtgtcacgggggtttgttgtacaaattatttcatcacccaagtactaagcttagtacccaatagctatttttctgcttctctccctcctcccaccctctatcctcaagcaggccccactgtctcttgtttccttatctgtgtccctgtgttctctttagtaccgtttattagtgagaacatgcggtatttggttttctgttcctgccttagtttgctaaatataatggcctccagctccatccaggtctctgcaaaggacatgatgtctttcttttttgtagttgcatagtattccatggtatatatgtaccacattttctgtatcttgtctgtgattgatgggcatttaggttgatgccatgtctttgctattgtgaatagtgctgcagtgaacatttgcatgcatgtgtctttatgatagaatgatttaaattcttctgggtatatacccagtgatgggatcgctagatcaaatggtagttctgtttttaggtagagcttgtcaggatctcttcttccctctctccttctttgtctatatatgcaggtataacaggtaaaacatatgtgggatgattctacatattttgtaaatattttccatgtcaacatatcaatctataacaccaatttcaaggttttgtagtccagccgcaccacaacaggttttcatgcatcccctattgttgagcatttaggttgttctcaattctttccactttcaatgcataaggagttcaagactcgatttagagaatgcctcaaaggtagcctttggccaaatctagaactagagctcaacagtgccacagcctaaaagatgaaatttagacacattcctggagtttggtgggatatttggctcattggcttgttggaccagcagttagatttggagtggttctgcaaatgtcttgccatgaacatatgatataatgcttagagggttaaaaagcatacctggattttcaagggttaaaagtagacctggattttaggtcccagcctggcctagagcataagtgacttgtggacatcctgaaaaagaaacccattctttggaatagcagaaaagcggcatacatcttcagatgaatagtaagagtgattgtgaaccaaagggtctgggtgacttggctgtttttatcttatttttattttatttatttatttatttattcttttaagacagagtctcgctctgtcacccaggttggagtgcagtggcatgatttccgctcactgtgacctctgcctcctgggttcaagtgattgtcctgcctcagcctcctgagtagctgggattacaggtgcatgcctccacgcttgggtaattttttgtatttttagtagagatggggtttcactgtgttaggcaggatagtctcgatctcctgacctcatgatatgcctgcctctgcctcccaaagtgctggtattacaggcatgagccaccgagcccagctagctgtttttttatcattggtcaaggatgtcacactgcatggtggtggacaaaccagtgctgagaatgaggccttgcagccaagtgtgtcactttgcagcctgtgagctaagatgtcacttgcaatcgtgtagggagagtgggccccggacagcggggagatacaacgtcctcatcttctgcaagttgctctggtgggaaagaagggaaagcaggaatgagtaagggaaacagaggaaactgagctctgaagcccaacctctgcttcatctctcgtttacagttccatccctgtgagcaaacccttggtgtctggagagcagaaccatcacttcccatcttccttggctgtcaaccaaaaattgcccctgtggccccctgtagtgcccctcaacttcatgtcctacagtagaaagtcctctgtaagctcttcaggatgcacagtctagaataatggatgtgatgcagcctcagtggtggacttcctgagttcaagttctgtccctctggattattcaatgtagaaacttcatcacattgtttaaccttcctagatgtgtttgctattcttcacaatcaggatcacacatatagagtacatcacaaacaatgtaagctgcaggacagaagggttttgtgttttccaatgctgcatttatttttttattgctgctataacagattactgcagacttggtggatacaacaacacagatttattcttttacagtttgagtggtcagaactcgacactagtctcacagtgcgggcagagctgcactcctttctggaggctgatgtggagaatcttagccttttccagcttcctgaggcatcctgcagaccttagctcatggcccctttctccatcttcgaagccagggatgtagcccttctccatgcatttctttgatagtaacagcaagaaaaggttctcagattttaaggactgatacgatgatattaggcccacctggataattaagactaatttttcccatttcaagatccttaacttagtctcatctgcaaagtccctttgccatgtacggtaacatagtcacaggttcccaggattacagcggcgtggacacttctgaggggtggggtaggcattgttctgtgtactatgactgccaacacccagaatagtgcttgacaggaaaacagatctcaaatatttgccataggaattaacggtgattattgaagagatccaatgtctttaaagtgcctagtgggatacctggcacatgggtgagaccttggttagtgttacgtgttatttgcagtcatatgcatcactcaaaggaaaatttacaaacacacatgtgtgcatgtgcacacatagacacacacacactccactcaccagtggatattgtttctagatgcttactccctgtctacccaaatcgattgttcctgctgcaggggcaggagacaaagctattgaattgtatggagtggacactgaccactccctttttttttttttttttttttttgagatagagtctcattctgtcactcaggctggagtgcagtggcacaatgtcagctcactgcaacctctgcctctcgggttcaagtgattctcccgcctgaacctccagagtagctggggctataggcgtatggcaccatgcccagctaatttttatattttcagtagagatgggtttttgccatgttggccaggctggtcttgaactcctggcctgaagtgatctgcctgccttggcctcccaaagtgctgttttgtttgtttgtttgtttgttttttttactaattatgagtcagaggaaagagctgtcccttttgaagtcattaaagttacagagtccttcacagtgatctcgaaaccttggagaactttgaaaataacccaaattctcaactctgtagtagcagactcccaagacactgcatatacttttttattcccttgagttcatcaccctgtggttgagaggcaacttaacaggttactggagctgtctgacttggtttgcacttctatgagtcggcgtcatgttgggtacactttgcctttattcctcgaatttgctggttttttggtttcagactgagtggtggagaggaggcaagatcaatacctcattgtcctcactgttgcgctgtcatcagaaagcaaagtgtgtgtctcctgttgagaatacaaaagttagggccgggcacggtggctcatgcctgtcatctgaacactttgggaggccaaggagggcagatcacctgaggccaggagttcaagactagcctggccaacatggcaaaaccccgtctttactaaaaatacaaaagttagctgggcatggaggtgcgtgcctgtagtcccaactattggggaggctgaggcacaagagtcgcttgaacccaggaggtggaggcttcagtgagctgtgatcatgccactgcactccagcctgggtgacagagtgagagcctatctccaaaaaataaaaataaaaataaaaaaataaagaaaagaaaaatataaaagttaggatatcagcacaagaacttcagtgttgtagatctgctctgattcttcattcttttcaagacatgatttggatgttctgcacctacgtctcatgctggatggtgaacttcagtgcatatgctaggatttgtgctccttttgcatcctgtggctaaaagttcaggctgatcagctaagctttctctatgtgccaatctaaggatgcctttgagaatagttgggaggtcatttgacaccctttccaatagtctactgcttaaaaggaaggctctggtggcagatggccagagctaagctcctgtatccactgctcactagctgtgtgaccttgagcaaggtgcttaagtcatctctcttcctcagtttctttaaccatagtgtggtaatagaaaccatacgtatctcccagagttgttataaagataaaatgagttatcacagtgtaagcacttagaactatatctcatatacatagtaaatgcttgttaaaggcttactgtgagtccgtgactacagcttatattcatattcataagcaaatagcaaagcaatagaacctgactatgaaaaaaggtagccatgagggaaagaaaaaggatggtctcctttggataaacattttccgtaatacgtccctaggaacacattgtccacaaaagatgttaataggagtgctgagttacagggtaccacagtcataaatatttgggaaatttcttctcctggagatttatgatgcgcattagtatgttaacattacacgttctgctagagctcagagtagagacactaattttggctttatttaatccagttggtcccagatgtgtttgaccacccggtttttctgtaggtcgggggggtgggggcgagaggatgggcttagaggtggttgtaatggttgcgcttttgttgtgcatagcacctagtaatagctgtaggaactagtgtttcctctcaagggcacgctgtaggatagtactagaatttaaagtgcatatagggatctgagtaaaatatagatttggattcagtctggcatggggcctgagatcctggatttctaagtggttccccattggtgccgctgctgctggttgtactggtctgtggactgcactttgagtagccagactttcgggagcagtctcttggtgataagaagaggacccacacggggacaatcagaaatgttagcaattgtgcagtaaggagagaggagagcctgaggcagaggtttgcaaccttgactgcctgttagaagcacctgggagaattcagaaagctgctgtttggactccacccccagatatgttaacttcaaaggtttggagatgagtcctaggtattggtatttctttttcccacaagctttccaggggaggctaatggaccaccaggctgcaaaactattggtttcatagtgatgggcttaatttcttaagtcagagagcctgtttctaatcccagccctaaattactacacatcattagtaatttatttattttttatttgagacctagtcttgctctgtcacccacgttggagtgcagtggtgtgatcttggctcacttgcaacctcggcctccccagttcaagtaattctcctgcctcagcctcccgagtagctgggattacaggtgcccaccgccatgcctgaccaaatttttttttttttttttttttttttagtagatatggggtttcgccatgttggccaggctggtctcaaactcctgacctcaggtcatccgcccgcctcagcctcccaaagtgctgggattacaggcatgagctactgtgcccagcctcaggattgaggaatttagttaaagttgctgtgcctcctttcttctcattgtaagaggaggcaatcagggtacttaaacttcaaagagtcttgatggagatttgatgataccatgtttgcatcccaaaagactggtgtctaacacatggtaagggtgcagtaaatgtcagttgtaataacaattattgttatgagtattattgttattatttgctaacaaccattcttaggtcatttttttttttcttttccaatctgaccaagatattgtattggttacaagctaaaaccagataaacatgtatttaattttcttaataagtggagaattgtgttaaatgtcttttgggtacatgtgtccttactgggggagtgcttgcttctagcctaagttgcctccagcaagcattcatggaggctgtgattgccgtgagaacaggtcaaaaactgtttttgtttactgtgacaaccccagtgcctggacatagtggttcaacctgtcttggttgttggcgttgaataaatggatggtaaccattccaagtggagatatgtcagctcctgtctgcatccattcatttatttcagcaactgaaaacaacgtaatagtcatttaaaaaactgaggaataccatattttggattatttgttgttccggtgattttgccaagtgtggatttcctttgctaattatggaagtagacaaccaaatctcatttcttgtttgttttttttttttttttcctttctagaagcagctgtgttccttgccctctgccaccatcccactcatacactgtctaaaataaatagctttttctttttctgccctgtcttgtttctttctccctttgccctccacccaatttcctcttcccagtgaagtctgtaataatgtatcagtttacttaatgcaattcccagccctagctttcattgatttttttcttatttgactattggcttatgatttgtggggtagaggaggtggtgtgcatatcatgtgaatggaaaggcttaataattttcatactgtttcataacaaatatatattgtattcaggttcagtgactgcctttatagaatcatgtcagaaagtggatttctatcctgtttcatcttctatgaaaaacggaaaacaagaccttttcccctcactgtcatcccagcaagatataaagatgctcaaatgaacatttgtggaaggacttgacaggtgcccttggaaaggaagcaggattttactcactgatattttgaatatcatgagagttagaattacgaatgagtacacccaagcacgcagtcggttaaggagactttcatactcattgtggacactgctcacaggcaaaattgattgtgcggctccagttgctagagccacggggatttgagaccacagctacatccatctaattcaggaagaacttgaaatagctcctgcattttcagtgggggtaaaaaaaaaaaaaaagagccttttcacatttatcctgaagatggagccatttaacattttggatactttctgatttttaaatttataactttaaattgactttgttttgagacattagtgtttcaggattttatttttccctaaaatatgattgcttcctaaccaacagaaggaagagtagtgtgaatatttggttatggtcatggacacctggggaccagcctgtgtccttgcccatatttccaaaggtcactcttttttttttttttttttttttttttggagacagagtgttgctctattccccaggctggagtacagtggtgagatctcggttcactgcaacctctgtctcccaggttcaagtgattctcctgcctcagcctcccaagtagctgggattacaggcacgcgccaccatgcctaactttttggtatttttagtatagatggggttttgccatgttgaccaggctggactcaaactcctgacctcgtgatctgcccacctcagcctcccaaagtgctgggataaggtcactctttcttgtttacctgtttctgcccatatctgtagactcagaaattatttactaagcatttctaaaatgtgtttagaattcccatcactgatggcttactatgaaggagagcatatttttaaagccatataaaagaaggaatgtgtttagttctgttactcttgtattaatcccttggttattgaatctagaatctttgagcccggatgatcctagagggtatctagtctaccttctcatctcgttcttcaagacttgtatttatgtagctagttgtcatggctggattaaaatatctgtgtttacttatgtaactctcaaaactcactttaattgatctttttagcaagggcctgtttttcacttgcaaatgaaggtgaagtaaatacagattggcattttctgtcctaaacagccaccagctcccatagctgaatactctcatataaggaagacaaaagcaacaacaaattaggggccaaaattccttacttagaagatgagttgtctcaattgggaaggatttaaaaaatatttgtataccactcaacaagccatctggagaccatcatgggctgaactcaggtgagacatcttgataaggtactggaagaacagctgtcttaccacagggagggtggatgtggaaagaaatctagaaacccaaatataacaaggagcccttaaagcagttgtgggcaactcctgcatgcttgagatgagcagtggagacgacagtggggctgtcttctccctttaactatccaacgccgagggtcccaggctctgtgatgatgatgtaggcaatttcttaagaacaagtattgtttttggtagctttactttctagaaggctggatctcagttctctctcccatatcacctgtgtccgcaggtggggagattgatgtttagagctaggtttatctgtataaaggaataattctgatcgtagaaaaactcgaagtactggagacctgaccccatgttgggactctctgatgccttgaacatagatcatcttctgggggctgggctgtagcatcaccctcatctcacagtctgaagtcctggcttggagccctactgggctcagagactgtggtccgcagcccactagtgttatcaatcccatcagcatggatgcctacagcaacaagaaccagaacacccaacagcacctgctgctgcctctccttctcctcttctttccccaccctttcctattattattgttgttattgttaatatttatacatctattggtataaggaaaattaggccaaaacttagtgtatcaagatcaaaacacattatctttcatagtttctgtgggttgagaatttgggagcagcgtagttgggtttcaccatttagtgtgataccagctgtagtattttgtagatgccctttataaagttaaggaagttctttctattcctcggttgtgagggtgtattttgtcatgaaagggtcttgacttttgtcaaattctttttctgcatctgttgagatgatcatatggtgtatgtcagggtttaaagttttttccatgtgtggctgcatttggtttgccagtatcttcttgaagatgtttgcatctatatttataaaatatgtagatctgcagtattctttccttttgattttttgtctggttttgatatgaggataacagtagtctcagatttcttcctcttctattcttttggaaggtatttcgaggtgttagtaataattcttctttgaaattttggtaaaattcaccagtagaggcactggggtctgggtttttctttatgtgaagttttttttgcctactaattcattctctttgcttggtataggcttattcagattttctatttcctcttgaaattttggtagtttgtgtctttccagaaatatttttttcattttatctaggttatctattatttttggcctaaaattgtccataagatacccttataatcctttctattctataaaattggtagtaatgtcccctctttaatttctgattttggtaatttgagttttctttttttttttcttggtcattctcgtctctctgtttcatttttgttgttattgtcattcttcttttttcttttttgagatggagtttcgctttgtcacccaggctggagtgcagtgttacgatctcggctcactgcaatctccacctcctgggttcaagtgattctcctgcctcagcctcctgagtagctgggattacaggcacccgccaccacacccagctaatttttgtgtttttagtagagatggggtttcaccgggttggccaggctggtctcgaactcctgacctcaagtaatctacctgcctcggcctcccaacatgctgggattacaggtgtgagccactgcacctggcctcttttgtttttaatcttcatttctgaaagtttttatattatctatatagcttaaagaccagccaaaaatcagctaagattgtgttcagacaccttgagcactaagaagtctcctgtcctctactgatgggtttgtgtgtatgtggaggtgtgcattgaaatttcaggccattttcaaatctttccaagtatttagactctactggttcctttggtatcacctctgcatctgcacactgcttcaggattaatctgaaatgtatgggctggtaaagtcattggctctctccagttttccatcactgagaatataatcacttctaccaataatgctgctggatatggtcacggccttctacctgaaaacacatgagctccttttggaccatggcaactgagctgccagtactcatagcctactctacccaggcagagcctttgtgttaactagggatgaagccctcatctagaataccaaagagtcccactgttcttgcctaaactccagtcgatttttggtgaatacttgttacattattggaattctttggttgatttttagagtgctgaaattttgggggggtcagttttgtccacaaggattattgctatttggagagaggaatgtctgacttcctcactcagccatagctggtagtcccaaatatttttcacgtgaacttgcatcctattagccaggaaagggcacaacgcattgggaaaacttgttttaaaacagtaaccgtagtctattcctgtggtgggggggaggagggtccccacatattcacattagaagtcttacgtgaagccattggggattttcctcaaactttacccacagcactatggttctacaggataagatcctgtcatctattagtgggtatggagaacattatgtgcatgcagttgacccacaaaatctcagtgatgccgtataattaagatgtatttcttcctttcatcatggtctgatgtgaattgggtctctctctggttgtaggttccttccagccgtggcaatatcatcttgcaacattttggctcagtttccatcgatggggatgccgagatcattggcaattacggaggatgtttccagaaagcattttatatcatttctgatcatactgtattagccagagttcagtcacatggtcccactaaaatacaaggaagactgggaaatgtagtattcctgtgtgcccagggaaaatacaaaagcaaacatttggtgaatatagtgcattctgtttgccactcattctttggagatcctatcacattattaagcttattctctgggaaagaaaattgggatgcagaaatcgtgaatgacttaagatgtgttgttttaagtaagttactggaagattaggaactggaaatatttattggcttctaatttagttttttcccccaattttactctgttctctctcactttcataaagtgttgcttcttaattgacataaataatacgacctaccacagccactttagaataagaatcattcctaattccaccagtttaagattaatgtatgcatgttttctttacagatgtacgtttatataatcaaacagctaatatgcatttgttttttattgtgtttgccaacacgcacatagtcttcatatgtctacattcttattgtaattactatttttattgccacataactttgtattgaattggtctaatatttacttaccccttcctcctattattagacatatagttgtttcaattcattttaacctatataacacattgtgattttaaatatgttttaaaatatatttttgcaacaaatgctgattaaattgcatattctgaccacctgtggacatttaggaacgctgtagttaaatagggtacctctaacttacatcctttatgctcttactgaaacatatgtgaatatagtatagtactatttttacataattcttttttaatgaaaatatttagcttgtgaagaatagaacacattctcaagagttgaatgaacctgttaatgtacttttatcagctttgtaatgcagtatttcattaaaatgtgtttatactaatttagtagtatggggcgaaggatgaaaagaaacccagaaatgtcagatcatatacattaattcactgacaaatgtttttgagtgtttactaagttccaggcagtcttttagaaactaaatatatagcatgaagaaaaatctttctctcaggaaatttgtgttctattgggtgtcaggtggcatgtgaggatacaatgtttgtattaaaaacaatgtattaatcgccatgaagaagaataataaaggtaaggagggctgggttcaatggcctacacctgtaatcccagcactttgggaggccaaggcgggcagatcaggaggtcaggagatcgagaccatcctgggtaacaaggtgaaaccctgtctctactaaaaatacaaaaaattagccaggtgcggtgccatactcctgtaatcccagctactctggaggctgaggcaggataatagcttgaactcgggaggtggaggttgcagtgagccgagatcgcgccattgtgctccagtctgggtgacagagcaaggctccatctaaaaaaattaaataaataaataaataaataaataaataaataaataaatgtaaggagaataggatatgttcgattgggtaagggatgctgttatatatgagagaggggtctgggaatacatctctgatgtgtaacatttgtgcagaaacatggaggtggtgaggaaaagattcacgtggatgtctagaagatcagaaagaaggaacggccggtgtaaagacacctggctgcagacttcttgtcatatccacagcaaggagtttagtgtggctggagcctggggtaggggagaaaaagagacaagagtggtaccacatgaggtgagtgttagctggggtagaagctaggaggggactggagcatgtagggctttgaaggtcatagtatggacctgggatttagctttgagcaggaaaagaagccattggaggatgtattagtccattttcacactgctggtaaagacatacctgagagtgggtcatttataaagaaaaaagtggtttaatggacttccagttccacatggctggggagaccgcacaatcgtgccagaaggcaaaaggcatgttttacatggtggcaggcaagagaaagagacaaaggaaagggatttccccttataaaaccatcctatctcatgagagttattcactaccatgaaaacagtatgggggaaactgcccccatgattcagttacctcccatccggcttctcccataacatatgggaattatgggaactacagttcaagatgagatttgggtggggacacagccaaaccatatcagaggatgttgagcacatgagcaacatgacatcatgcccatttaaaataaatactctggctgctgggtggagaataggtgtgggaaaggatggaaccagggaatccagaaggagacattacactcatgggggtgagaagtcgtggtaaatggaacagaacttgcaggtgtgagaagtggtcagagtttggatatatttccaaagcaaagactatatgatcgtatgcttaggtaatggtttgaacgtgagatgtgaaagagagagaggggtcagtgtttactatgggaatttttattattcttattattttagacagagtctcgctcttttgcccaggctggagtgcagtggtgcgatctcagttcactgcaacctccgcctcccgggttcaagcaattctcctgcctcaccgtctcgagtagctgggattacaggtggctgccaccatgcctggctcattttttttttttttgtatttttagtagagacggggtttcgccatgttggccaggatggccttgatctcttgacctcgtgatccacccgcctcagccttccaaagtgctgggattataggcatgagccaccgcttctggtctactacaggaatttaagcttgagcattcagaaaattgaagtgctagttccaagatggattgcaagagaagcagctgttcagggaaagagagagagaagaaggaagaggaattgcaggtttacacttgtgtgaattcggcatgaggtgcccattggatttccaaggagagatgtcaaggagacagctctgtgcgtctgtagaacaaggaagaggtttgatatggagatatagatttaggactttccttcttatggatggcattagacacctttagacaggaccagctcacatccttcaccatgtgcacaggctctaatatattcaacatttaaaaaaattaccctgtgactctatttcctctccatctgtcactctctttctctgatttcctttacaaaactctgaaataaaacttgtctatatttgctataatttcttttccttccattctctcttgaattcattccaacaaggcttccctcctgcccaccttcgaggtgatcttatcctgtttcaaggcgttcaataccgacaataagctgattatctccattttacaatgaagaaaccgaagttcagaggggttaaagccacttgagtattcaatagcagaactcaaaccagagccttgctttcctttcctatccccagcctgtctctttccactgcatccttgttcacgatgaaatcgtgtttgcaaacaagggcttggaaggtgatcagcgtgggtttaagtaccaatgtacacagagcatttaaaaaattcctcatagctaaatagaatataatatttcacccctatacacttgtgggtctaaattgttaatgtctgttttcttacaagaaataaaacttggagaaagactgtggacttgttccttaaaacactataatttcatgtaaatcattaaattttttaaaagtctgtgataatgacatggttgatgagcgtgagagtaggagacaggaggagagttggatcttctttccttgacatcctaaagaagaaggaagacaggaacctttcagagcatagcaacagggtgtgttaccctccttagagctaaggacaggcagacccacatcttctttcttacctaaatagctatgacttaaagtcaatcttgtactgctgtggcattattatttctctattctccttggatgtgtgtttcttgcaacggaagtaggaggattgtccagaggatttgaaaaatatttttttctgacatgattatatctgtatatgaattcatttttttggctgtgatctgtaaactcaacaaaacaatgccaaaaaaatcaaatgtggtgaagtgctttttttaactcctgggttcgtcatcatcagtctaaaactcagtcatttatagactgattcatgaagaaatatacaactgatgactctgggttagagtgttgttccaggggatgatttttctgtgcaagggaatttggagtgagtttgaagaaggagaggttatgaattagtaaagataaatagagaggatcatctgcatatggggaatgttccatgccgaggtgtgagcacaagaatgaatacattgttcataagggtctgtaaagatacttgcttggttagagagtagactgcagaaacagataactaagaatggagatggatatagtgaggagaggggcggggaggagtgtgaggtcagggaaaagaactggacattgccctagcttcacgttgaaagcagagatagggagagtgtggcttggtgtggaccatgccataggctgtatttggatggattatgggttagtgtgaggaaagactgaagtcaggaaacaagatggaagctccatagcaatgggcatgtctggagatgacgttgaccttgcctctaggaggggagcagtgaacatggcaacattggtgccaatggggagtgaaaaggagatggaagaagaggtcaatcctccatgtgggcagtattgggcatagcagaatatgcagagaatgtagggtcacactggtgaacaaaggcccccgagttgggagaaatctaatcttcgctcaatactctcgtggttcaagatcctcacaagtcattggatgtttctgaagctccattgatctctttatttgggtatatttatctgtgtatctagtcagtgatactgttgaactgtaatgatttgatatccatttggcatgtttttgagcatcagttatcatggaccagtagaggggatgcaacactatatcagagagacacttttatcgtagatgtatagttagaaagttattgtcatgcttggccctatcatacaaagccctgatgctttcatgggggaaacaggaaccctttggatgacctgtatcaggtcatagaaagcattctgccttctagggaagtgagttgggatgacgatcgatgttttcttggagagatgctttggtctaagccatgagaggaggaaagagtagaggagggatattttaagctaaggtgataacagcatgcacaacacccctagatgtgacgaggctgagaaactagaggaagggtcagggcagagataacagggataaaagattgggaatttaggcggaagtcagacagctcagcattttctaagcttttctaatgatggggaatttaagaattactgtaaccaaaaataactagctctcacaagtattgtgtaaggtgtctctggaaaacagattggagaagacccagctggaaccaaggatatcagttaggagattttcatattaatccaggctggagatcaggatacaggtggttccagtgggaactgagcaagtaggtagttttaatcaaaatttagaaggaaaaatgcaccttacttggtaactgcttggatttgatggcaaagtgggatgtagagagtgggagacggaggggcaggctaggataacattaacaaacgtttgccagacacccagagcaaagtcagctttcctctctggctctgatacgaatgtgaccattgttaactgtttggcacatgtgttaaccttagaatgttaccagtgttaactgttttgcacatgtgcgtgcatatgtgtgcacatgaatgtgtgtatttaatctcaactattcttattttgccatgaaattatttaacacacatgtgctgtgtgtatgtatatgtgtatacactcatccctcagtgtccacgaaggatcctcactaataccaaaattctggctttgtgggatccacgtatacaaaaagttttccctctatatttgtaagttttgcatcccatgaaaactgtatcttctatgtatgctcagttggataaaaaatccatatataagtaagcctgttcagttcaaactggcgtgatccaagggtcaatagtttacgtctacccacacattaactagtggctgtttcaaggaggcagactgagtgatttattttcatgcttccttcaattttttctaagtttttaccatgagaaaaaaaaaaattttctccagaagaccaagaaacaattagagctttgagaagaaatttatctgctgttattgattttgttttagccaaaaaaaaaaaaaaaaaaaggctaaacataaaatacagtgttcgtaaacctggctggcaacctttctctgatgttattgtctatttcagacaacgcaaagaggtgtatgaaaccagaaaccttcagctatgaggaaaacaaaataacaatcaatatattttgtttctgcttacattttctgctaactccttgtttcccagctaccagagagctgtcaacttcaggaattaaattaaaaagtataaagctgtgaatgaaaaaatcttggaagtaatgagactacactgaatgaagtggaggcgaaaaaatggaacacagtaaatgggcacctgtatcagtgtcatctttaaatgcaaatgaaaatgtcccaaaccttcctaccgctgatactttgaagcacatacagttcatttttagccaggtgtatcagttttgcattgccaaaagtagtagtggactaaaacaccagtctgcttttcttttattaagagatctgtaataagagaggttgaaagaaattttgcagtgccaaatgagactccaagtgcagtgcaagatgaagctagtcaattctgaaatatttgaacatgtttatttatctaaccctctatgaacctgggcacagatgctaagtcttccatgttttatgtggtttcagatgacctctgaaaattacctgtgccattctaaaccaccaaatggttccattttccatctgttgtcatgcaattgttttgcttaccagcagctgtcagatggatattacaatgaatgctttcatagcaaatgttacaacatcaaacataacaagcattgaggatgaagctgatggcacagggagatacagagagcttaccaaaggactggaaagggggccctggagtccgcatcaggacactgagtgccattcccggagtgcattcaagagtctagtgcgcgctggttcacaggtgtctctttttgccaactcatcataaactcctcagctgttaatgcagagtcgcttgctgcaacagtgacagagaactgttgggttgccggggctaattgctatttagctctttcagaagggttaaatgcattggttagcttgctgaaggtttgggagatagcttaggtgcgggagcactcaaaccacagggacgtggctgtcccacctgctctcgttgttgggggcattttaactcatcacctgatgctattggaagtagctataaaggacagctggtggttgcatttatttggagtcttaattcacctgttgtctctctccagttgtggttgaggttagaacactctgactcctagaattcgtacattccactaaacaagtaatatatgatattttttaaaaaaattattccatggatattttctccctttctgtggtttgtcttttcacatggttaaacatatattttgttgtgtagaagctttttcacttgatgtgatcccaattgtccatgtttgctttggttgcctgtgcttgaggggtattgctaaagaaaatctttgcccagactaatgtcctggagattttccccaatgttttcttgtagtagtttcatagtttgaggtcttagattgaaatttcagtgaaagagataaacattttgtgaagttatctatgtttgtatatgtgtgaattcaggtgtgcagttttattattttttgctcaaagtggaatactattttgattagtaccctcaaaccgaaatagtatttatgaagtccttagtgcatactcctgtgcttcaaattctgtagatgttcaataagtatttaaatcaatgaatgaatgaagggcagttatttgaatgactccattttggcttcatgtcttgtttggggatgttgagttcaaagttattacatccaaaccaacactaagtagtaatgttaggatgtgtcctatagacgttgttctgtatatagtatcaacagaattatgtagtgtcaggtatgtagcatccggggtcctacagcctatgtttgaatcctggctttatgcaacagactaggcaacctggaatggaatgaactacttagttttctaatcctgtgttgattatttcagaaaattaggataataaaaggacttactccataggattgttatgaagttgaatgagaaaaatcgacttaaatctttcagcactgcctgtaacatataagcacttgatatatcgtcgatggtactattattatttgcctaacattttgcttttggggaacacacagccaccaatttcccctctcagagatgccacttgacttagtctctgttggtcccacccttaaaattattgaaccacgtgctatcaggcatattgcagcaaaatatggtgctcagaatatcatggcttatgtattttatcttgctggcaaagaattctaaaaggtttaaagcttaaattagagcccacatttaaaccgagttgggagaaatgtaccatatgcctctccatcttgtgtgtggtgtgactgtaagtgagagtgaatgacaacacgccgggggctccagccaaaacttgaggccggcagtctaaatccagatcgggcagcctcccagcctctcccgattctgtctgcttgtgcatttgaccttgacagccaaggtctgtgtggttcctctttgctttctgtcattaatcagtcctgaagcatcttctagacagacagcttggttggattgaataatgcgtctgtggtttttttttttttttttcttcatctgatacaggcatgagttaaactacagtcgcctccattgctgaacttggctattgggctgggcagtattttcaagcggtgttttacctgaaaatgttctataaatgagttctgaatgttgtcttctccctgtcatagtgcctgtgattatgataacccacccttgtaagctttctcctatagcagaaattgttgccagaggaaggggagggatggcatgtcctttcactggcaagtgaggccagattttgactttgagtcactcttgagaatttagggggtggtcacatggtactgtgcaacaggaagtgatatttatcatgataagtgatgtttaccatgccccactttacaactgccgtgtatctcaaatgttatgagtataccactgaatgcattctttattggagagaaaaaaagttagcaccgtatagagaaatatatagttgctagaactgagaaagggtaagaaaacaagagtaatctgtaatttttttgttgcatggtccaaaaggcaatttctgttgcctttttatggtgatttggagtttttaagatgttttgacttatttaacaagctggaaactcatggcagagagaatgtttatgacttaccgaaaatcttatggaagttcaccacagagctttccttggaatgcaggtatcgagacttgattttcagaattttgcactagatttcctaacagaaacctcgtgatttgaaggggggagaatcatctctgcaattatgtcactgctaagctgacatagtaaccaaggggttagtatcagccttggaattctgtaaatatgtcttgggacaaagtggtatggaactacatctagtagattgaggaagaaggtcatggaattagaacatttctgttacttctaggcataattttcaggactaaggaattcagcatgagctgcatctgcctcctgctacctcctgctctctcccctgtatcaataactattaattctgtttccttccccatcgcaatttagtttggaagatgtcagtgctatttaacgcagcgagatctccccagcacacccctcgggaccagtccttgggtgttgggagggcattctaccctattatctgtagggtggctgtgcttgttctcatgccacatcaaaattggcattggtagctcgctaatgagtaggtagagatgggcttggcattttgtcttctgaaggaacggcagataagatgaataatgtcattcttagttctagttttgtctcttcttactgtctttatttgagcccctctacctccctcatttcttcttccttccctctccattttccccttccttcctcccaacacccccatacacatgcacagctcacacaccgttttacctatctcttaactgacagctttaataaggatggtcactaagcatcttcttataatttatgatagaaaatggtatgcaaacttcagagatacggtggtggagatccaagtttatatcttgagtctaccatgtaactctcaatatgtgctctagacgctctgtgtctgtttggttatctataaatcagcaatgataattgtactgacctcataaggttgttgggatgagtcagtaagattatgcatgtgaaatgcttagcacaggttgtcatgcactaaaagatttccgtaaacattgtttattatcattaataaaaagcatctttattgagatccatctcataagatgcaacaccaaagctaatatttcataacagacaagcactctttgagtgatatattatgtcgaaattcaattaaatgtcccaactcagtgtgttggaactggtagcctgaaaaagtcccattcatctgatggctgtgaaataatgagaatgtttatctttgttccatgaagaaatgtataattaaagcagtttgtgacgtacctcccgaagattcatctctaactctgtaatacatttagtgatttcaatgcaaatgaatcgtgttggtgaggcaatgtgttcatcctatgtccttatctgttctttgaaaacctcatccaaggctctggggactctcgcagcagattgaaaatccccttgctggcaacagctgattagactgaggagagacatgcatggggctggccaatcagattatctcttcgtgggagttaagaaatttgacacagccccagtgtccatattctttacatatatatacattatatatatatatatatatacattatatatatatactatatatatatatatatatatatatatatatataaaattcagtgagaaggttagtaggaaatgaactctaggaggacaagagttggatagacattatcatttactggctaagtgacctagagcaagtcacataaccctgggaacctcggtttcatcaatggcaaagcaaagatgctaataggggctacttttaaaaaataaagaataaacacaataaaacaggcaaagcattcagtgacttgggcagcagtgagtgtgcagtaaatgctaaacattttgaattgtattcagccttcatttttcagcctgatttttaccttgattctcacattgaaactgcccatttctttgggtattttgggtcttttcctgttttaccctccccactgggtttgtcactgcacatccctccttccttttgaaagctctgttcttccttcattctcctggtaaacttgccgagtctctgcctcattgttttctggctttttgcattgcctcatcttcctgtgttcacacctaagcgaagttgctctccaaggttctgacctccgcctcttggctttccattgtgttttctcatgggtgacctaattcacacaacatgcctctaagctgatgaagcctagaatctcattcctgtatactaactgcctcttggatgtgtcttcctggaactcacacattctaagtaagtggaattccacatctggtcatcatttcataccgttccttccctcatcctctctcagttgatggccctcaggtcctcagtttagaaacttgttgttcaggctctgcagctcccccatctcaacctgaggtcctgcattacctcctgaagagccacagaatccagcatttgccttattctcactgttctttgtgaccagttcacctctcacccaggctgctgcaacgagcttctaattggcatttcttctctttccccttcaaatccctcatgcttgaaaataaaaatttggtcatgcctttcccctgtttaagtgttttcaggattatgaccaagcttagtaacgtgacttgttcctctctgctctcaggaacactccttgtttctctctttcaagaacagcctatttacagttcagtgcacgtaatgagcctgtactcatttctctgtctttatgtatgctgctccctggacccaccccattcccttctactatcttggcctgaaaatgtctacttatcttctaactctcgattcagaggcagccttcctccaggcattctttccctgagtgccactggctctttgtctcattttctgggttagggtttcttacattcatgggcactccaaatactctatccctatacatctatcttgatgcataattgtaaatactgtttatctgtccattttcaactttacgtttcgtgtaccttcccttgagggcaagagctttatgtttatctctatccttagtgattaatatggtatgtcatgtgtactaggtgcttaatatctgagtgactactagaatgaatgagtgagtagatatgaatagttttcaagatttttaggaaaccaaccctatttaacttactctgtgatgaatcttttagttcattcttttttaattcatgaagtctgcattactctaggccagtttttccttgcccccaaatctttcagatacggaatcagagaaacataagatgttagggttcacagttttgcaaaatgctgatgtaaaatacccaggagcaaacagatggcttaagaaaggtattaatcatacgacatattttcctttataaaatgccttcttacctaccgcctttttatccccattataggttttctttcatcttggcaatgtttagagtccgccatcttgccttgtaagccagtcttattatagcatttgtgctgtgcctccattttaactcttgacttttgttgctcccaccacacgttccttaaaagtcaatcaggagtttatgtatctttccgtcttctggactgagaaaaatttatggcctttagtagatgctcgttaggtttgtagaatgggccgggcgcagtggctcatgcctgtaattccaggactttgagaggccaaggcgggccaatcacctgaggtcgggatttcgagaccagcctgaccaacatggagaaaccccatgtctactaaaaatacaaaaaattagccaggcgtggtggcacgtgcctgtagtcccagctacttgggaggctgaggcaggagaatcacttgaacccgggtggtggaggttgcagtgagccgagattgcaccattgcactccagcctgggaaacaagggagaaactctgtctttaaaaaagaaaaaaaaaaaaaggtttgtagaatggatatgtgctctctctgaggtcatggggtgagcagggatgccaaaatatgcttactttgagtcacggaagcagtagccatttaagagccttcaaagggccagattgagtttatgtgatttaggaatcatgatcctaacacatctccagaaagagataaacgggcttgagaagaagcagagccatgctgggaaatagattgggtggaatttaaatagaagtctggatttgaagtaagaatcataaagactaggagtacttgtaatattcataataaaaataaatcctatgagaaccattaattaccatacacagtatgcttactatgggcctggtactgggtcaagtgctttgcattcattctcacttagtgcttcaaatagttctacaagttaggcttcattgtctcccttttcagatgcagaaactgaggcctcaaagagttaattcagccatttaaggtaacaaagctaccaggagtttgaattcaggattcctaagctcgtgctttttttacccctgcaccagaggaagttgtgtgcaggtctctgcatctgtcaagttactggatatgttattttgagcgagtgacctaacagggcttcagtttcatcatctatgaaattgacaggataacattatctttcagattttttgtaggtaatttaaataatttgcagaaaacgtttaacacattgcatgggatacagtagacaataaatctggacttttattaacgataaataattagcttcccattctgaaatatttcaatatggatgcgtggctgcgacttaaaaagccaaatccaccccccaaatgtgaattattgcctaactcggtccctgaaactggaaatagagaaataacatgcaattccagcagtatcaacattattattttcatttttttcctgatgctgtcagcttgttatttgtgctatttctttgaataatagaatttattcaggcaatttatccttaatacaagcgatataaatggggctatgcaatccttatatatcatgctaataatgtctggttcatcttttttttttttctccctgtttacatatggagacattgatttcctactccgtcctgtcttttattacattttctgcatcgaggtcatctctgtccgctgcctacactggattccagtagctgaagttgtgtaacatcattcagtgacattcttaaagcatctactatgtgctttcttcaaaaatgtgtgtattagagtggaataaaaaagaagaaagacatatataattgctgtcctcagatatatgttaaatccattagttaaaaatgtccacctagccagtgatttaaggacaaatagaaagctttatattgggaggttctgaaatagtgtcagttaaatgcatgcatgtcaccagaggctgtggatactatgcatacgtcttatttcttcttcctctgcaccctccctctggtggcccccaagcatctcttggtgactccccaaactgagatttctagttccagtgtttttctttttttttccaagcttgagactcatattttatcatccgtatctcccactgacccctggacacccttcattcgttgtgtctcaaactgaaatcaatacccctccaccccatccgcaatctgcaccatggtgaatcacatgtggtttcagcttacccatgttggggacctgcaagccaacactgggttgcttgttctatcatccctgctccacctgagcacaattaatggttaattcccatcaactaacttctctataatttcttgaactcaacctggtgcttctgtttcccgcaaagacaaaaccagataataggaacagtagaggaccaggatcacctgtttggtgcacaatgagtttctttttttttttttaatttttatttaagattcaggggttcatatgttgttttcttatatagataaagtcatgtcatggggattcgttgtacagattattgcgtcacccaggtattaagcccggtatccaataattatttttttctgctcctctccctcctcccaccctccatcctccaccctcaagtaggactcagtgtctgttgttcccttcgtgtccatgagtttccatcatttagcttccacttgtaagtgagaaaaagtggcatttggttttctgtccctgcattagtttgctaaagacgatggcctctatctacatccatgttgctgcaaaggacatgctttcatttgtggcttttctaacacattggaccaaaaggtctttaatctctttcataataatggcattgaattaactaatacttacctgacgcagataatttaacttgtctacatattcacctggtcctgtgcatttcagacttttgggggaaggatgaggggggtgacaggtgagttctcatcatttggcagccacttataagtgaaaacacaaggatgatttttatcatgcttcagacagaccttctgaggttagcgccaagacaagggtattgaatgtgcacacagaaaaagaaaagctaatttgagtagataaaaaggagaaagaatcagcaagacttgatgacaagatacattcaagggaataacacataggcaggaatgctctctaaacataatcagcatattacatgttttgtctatgactttgtgaatgaagcccacgggagaccttcttaaagaaaataaagagggagactctttttaagatgttaaaatagaggacaatgaatgcttttgcgatgagttatctctgtggaactgtgtgaccttgagcatgtcagtaacctctgtgggacttaattcatcttctgaaaacaagagattggattagataattcctaacattccatgcttttaaatagacttttatgattaggaatttggcaggtagaggggtggaagcataacatttaaaagttggtggtgattgagtcgagttagaagtgggttgaattatttttggaactaaagtgtacccttgctgaaatatagaataataatgagtctagtattaatatagcctggcttaagtataatactaatataaacaaaattatattgagggaaaatgatgtttatagagtacaccatcaagatgagctctagaaaaaggaaactaaaccttctctaaacaggtttttttttccctatcatccgcttctttttacattatcattatgttttccaggctggcagatgaatatcaaatctgcttttgactgaacattttttaaatctctctgatagaatatatatattttttcatttatgaaaagcaaataggtcacgtgttttctcttctgcagcaaagaaatatagcaaaagtttctatgctccgttccattttcttattgaaaaaaatatttaatataaatgaaaaatattcatttactttttgaacaaagtttcatcacagatctcttactcgggagtaaatactggttaaaacaagctaaatgcacattcttaataatttaaagtcagagaaccagccatgtgtaaaataggtgtatgttcacataattgactacagtattttgctacatggttaaatgcatgatttcccctaatagaatgccattgtggtctacatcacattttctagttcatgaaagtcaaatgagctgtgaccatagtctcccaaacttaatgggaagttcattttgtgacttctgagtttaaattgtgtctttccaggatgaatcagtagatctaaagcacattaatggatcacgtcaccaaaaggtctaatcctgagtgactaaaatggtagttctaattcagatttagtgcttttctagcacattggaccaaaggtctttaatctgtttaataatatattggttttgtattaactaaataatacttacctgatgcagataatttaagttgtctacatattcacctggtaccgtgcatttcaaacttctttggggagagatgagggggtagcagatgagttttatctgtgaaaaccagtaaagaagtagaactttatagacaggggctcacagtatatatttttaaaaatctgtatgggatgcttgttagcacaacaaatttacacactgctctgccaacactctcagccacagctacctatcagaaggttatgaagactagaagaaaaacacataagttatgtcctggactgtgcgaacactcatgagcacagccagaaactacagctggatgttcaccgacagccagctatccaaggtttttgaccttggacaatgagcaggggttgatggagatagccaggcctagagatggcaccatttggaagatacaaatggagatgtctagagggtgctggcagtaagcttctgcaaggaccccattggaaagggagccaaattgtttctgttatctcagggaacaccttgattctgaaagacagtgagagagcataaggctacctaagacttctggaaagatgaatacaactattaatatcagagctgcggcctcaagaacagccgggattctccctaatgacaagagggtggacggtctctctgcatccctttcctcaagccttttgttcaacgcttttcattgtatgccccgaaagagagcagttttaagcatctgcgatgtagtagggtcacctgatgtgagtgagagagagagagagagaaagagagaaatgaaatcaaatggtgtgggtgattccagttgccttcttgttagcaagagtgtataccatcagttttgcgataacacaacatatgtgttcctaaaaatcaccactctgtgtaaaatcacacaatataaaccatgggacttaaggggaaaatgggattaaaagcaccacactaaaaagtttcatcagtgacacatttaaaaaaatacagttttacacacgttaaatgattaagaaatacataaatactacaggagagataaccctttaccttgaagaagttcacaagtttgcttggggaaggacacgtctgaagggttgtgtcttgtgtgttattgtgatgggatagacaaggggacttacctgaaaccagatggtaaatggtaacaccagatgtgggtgggtatgactcaggaacacatgctgtgaattgacgtagcaggtaagtgtttgaggtgtgtgcttgtgtgtgtgtatttgtgtatttttatgcagctcatttttgctggatagagttttcggtgttaacttagtgaggtttttttttttttttaagtgaaatcgagcatgagcaaatgtgaaatccgcattatgctcaaatcgttccctagtttttttagctcccacatatgagtgagaacatgtgatatttgtctttctgtgtctggcttatttcgcttaacataatgtccctccagttccacccatgttgttgcaaatgacaggatttcattctttgtgtagctgaataatattccattgtatctatggtaccacagtggctttcttcattcctccgttagtggacatgaaggtggcttccattccttggctattgtgagcagtgctgcaatgaacatagaggtgcagacctcttctttataagggttttcttttctttgggagagagccagcagaaggattgctggatcatatggtagttttatttttagttttccgaggaacctccatactgttccccagagtggctatactaatttgcattctcaacaacagcgtataaggattcccctttctccacatcctggccagtattcattattggacttacagagatagagtggaatgatggttgccagaggctgagaagggtagcccggagtggggagagattggggatggttaatgggtgtaaaaatacagttgatagaatgaatgaggtctaatgtttggtgtcataatagggtgagtatagttaactatattttagtgtattttctaaaataactaaaagagtggaattagaatgttcctaacacaaagaaatggtaaacgcttgaggtgatggataccccagttaccttaatttgatccttacacattgcctgcctgtatcaaaacatcacatgtaccccgtacatatgtacatctattttgtgtccatgataattaaaaataaagaaaatttttaaaattgttccatactctgtcaactcatggacatacatttgcatgttcaaaacaagcattatggaattgactacaacttagagcatgagatggggcataaatattgagggtcccctaggtcaactcaggtccccattgtgaacatgtcagagtattggaagagaccacagttcccctctaccttgaatgcaaaccagccccttcatcatgtgcccaactgcattaaaaacaaaacaaaacaaacaaaaaaacataccttgagttgggagaaacacatagctatgtcagatcattaaccagtttctaacggagcaacttcctagggaagggtatgtttgaatccactggatgtttttgctttacacatttatttagagcctaattttcacatggctgtgtctctactgttctcttatctcaggtatcgatgccctgagataacttcattccaacaatcaaaacttgtctaggaagacctgattgctctgagagatttgccttgtgatttgatcatttcttgccatccccattgactggcgatcttcatggcagctttaaaggtgctttgaggttattcaatccatcttctttcttttagaaaggaggacaccgaggcttggagggaaaaaaagacttcactcaagaacttaagacaaaggctgtttcacagataactcatgcacctctagagttttcttatggaaatgcttaacagtatccctgttgggtcagtttctttcttttatgctgaaaaaaaaatcactttattgaggtataattggtattaaaaagctgtagatgtttaacgtatacagcttgataaattcggaggtaactatacatccaggaaaccatcaccataatcaatgctgtatatttgtatttatccatcacctccaaaagcctcctcccacgttctttatgtaatttattttttagtattgatttttcttttcattttgtttctgagacaggatctcattctgttgcccaggctggagtgcagtggcacaatcagagctcacggcagctcaaatattcctcctgcctcagcctcccaagtagctgggactacaggtgcatgccaccatgcctggataatttttcatatttttttgtagagatggggttctcactttgttgccaaggctggtcttgaaatcctgggttcaagtgatcctcctgcttcagcttcccagagtgctgagattataggtgtgagccaccgtgcccagcttaatgttgattttccttttgtggtaagagcacttgaaaaaaaaaatccagcctcatagcaaatttttaagtctacaacacagtataattaaccataggccttacattatacaggagttctccagagcttattgcattactggagctttgtaccctttgactgacacttctgtacttcccccttctccaacccatggcaaccacggttgtactttgtggttctgtgagttttgatgatttcagattcctcctaataatgggatcatgtagtatttgtccttctgtgtctggcttatttcattcagcattatgacctctgggtctgtccaagtaaatccaaaaaggatttacttcctttttaagactgagtaatatcactgcatgtatgccattttctttatccattcattgttgatggacatttatgttgtttccatatattggctattgtgaatagcggtgcaatgaacatggaaatgcatatatctcatggagattctgacttcagttcccttagatacataccatcatgggaatgcaatcaaaaccacaacaggaggtcaccgcacacttattgggagggctgttatagaaacaaacaaaccccccaaacagatgataacaagcgttggtgaagatgtggaaagaagtgaacccttgtctcttgtgtgttcatagaaacataaattggtgcagccacaatggaaagcagtttggaggtggctcaaaaacttaaaaatagaaatacatctgatgcagcagtctcacttctgggtctgcttctttcatctattgtgtatctcaaggcaaagcaacctgcctatgcctgatccctgcatacacaaacacagagaaatcatattaactctcaacctgttggtggctctgccagttctgttttgtttctttttttttttttttcgtgaatgactaacaatctaccatcagaaatgacattcataaaattatttctttctacagttatttctttgtttcttttcatctctaaacatgtcttattaagtacagggtggggagaacacagttattcctattaccactgatgttgttgatactcaactttggaatcttcccttttcctcccctaccctcacctcatctttcaccaaattcttcacaaggagagttttacaagctttaaactgcttccattttacagtggggaaaatgggaatacaaaatttggacatggattggtaatttcatgagtcaatgttgcgacaagattgacagcagcttctgtgaccactcatccagatgtattactgaaaacatgagggtgcaatgttgtggggaatccacctttgttatgtttttttctagaagggcctagaagcttctgaacttgctaggcacttgggagaaaattgattaaataaaaataatgaaatccatcccaccaacaaaaatagactgaattattgtttaacagaaattggaactaatgttctagggaggttatttgaacccaggcatagaagtgggagcatcatgatggtcagggaagaaagcaggtgacattagagactaatttgtaggcacatatacagtgtccttaaaatgagccatttatggggtaaagaaaagctgatcaaattgagatattttagaaagtatgcagtgtgaaggggttgatttctttataatgtttttaattgagttggatgaccttattgacaatggatgccttttgtcagcacgttgtgtgtgtgtgcctgcatgtgtgttcctcataaacccgtagctttctgcaaaaagggcattccaaaagaaagaggtgaaagaaaaatgcataaatgcacgataacacacgattaagttttgaccccatagattgttaaccttcaaagctaactctgcagtagcacaatattattagcaataaaaggaatttgctttgcccttttttaaattaccataaaccgattgactgagacagaatgatgttaatatttaagaagtaggacactagattctattatctcagaagctctgtcaccaggccctctctgtagtcctgttatctaattattgggcttaaattgcattagtgtgctagcaatttgtctaccattggaaaagtaattgacatttgggttactgcttcatatatgggagacttgctagctagttccgaagagtcctcttctgtcagggcagattagcttaatgttgcctagaagaaagggaagctctgtgttttaaggtatgctgcctctgtagctggttgcaatttggtattaaaatttcagttctgcatcaaagctgataagtcacctgagatgaaattgaacaaggttgtcgtgacaaagtaattaatggcattttttgactttcagatgactttaggggaagcacacttcttctctgcgtctgcttctgctgccatgtttataaatatgtatgcacatttacaaaacatctttaactgttgtcagatgtttctgcaggctccagatttatggttcccctgaattaaatagcaccaggtacatttggtgtacagcagtgatctggcattgacggtaaaggctgtgagtcttcataatatttcaatcatattttgcttctcctgacaccacacatcactgataggcactctctcttttttctatttctttgtataaaaatggaaagtggtgtgtttggttattctatttctagactttttttctgctcaactggttttggtttgtttaagagaagactttaagtacattcacaaatattttgcatttccctttgaacaagagcctacgagatcatacttttttttttttttttttggctatgtggagagcgtacctggaaaacagatgattttgatgtttttgatagccagtgcacctgaaagtcacaggcttctttcacttagatctggagtatatgtattctagggtcatctaaagagcagaacatagagatagccagccactattttctttaatgtgcaaactgaagatgaggctgaaaagtattcagaaattgattttaaaagttgatgtttctgtcttttaaggcacaggtcaaatctgactcaggaagaaaacttcttactatgatttgagcctcctctcttgcctctctcccctggctcactttagcgttcttggcttcctttcagttctatgggcaagccaggctctttcccgctgccaggacgttgtgtgtgctgttcctgttacctgggccgctctttcctgcttactttgccaagctagttacctcctatccttcaggaatctgctgaagcatcatgtccttagaggtctggttacttcctgctctgctccagttgttctcaatctcagtgtgattgcttccttctcaattcttgctatgataaacaactaatgtatttactcattttttgtcatccgctttcctcaccaaaacacaggctccctgatggcagaggtatcatctgtcctccttgtccctatatctccaggagctggcgatattaaatgttcaatgtttgttgaatatattaaattaaacctttcccaaatttccaccacaatacattttttaacttttcattttgaaataattatacactcatcagaagttgcaaagataatacaaatgagtcccatatactcatcacccagcttcccctgttgtaacctcttacatcagactagcacaatattaataccagaaggtgcagcaggctctccctcccttttactttaatggtgggtgatttcaacaggcaactgttatttgcttaatgtaatccttcgctattttatattttgggacattttatctccccttttctgatgcttccttcaaggacaacatcagctttttcagcacatggtgagcaccttgtaatacacttaattcttaagatagtgaactggaatgtgatcagaaagctactttttttttttttcaggtgcacttgcttaaaaaaaaattaaaaggtaaacagtctcaagttttatttggagttgctgagaagtttacccagcacacattttagctatgaccccctgcattcctgccaagcaggctcctgacttgggtcacccatgacagtgatcaaaattaaccctgctgctgctggactctttcgtttccctgtcttttccctttagctttctagtgctgttagtggcttctgagactctccttgttcagtgaagcattttgcataaggcacactttatcttttatctccaaagaaatggcagttaatgcaatctatagaaagccataaatgaggctgataaaattatctagcagccaaaaggttgctgcactcatttatctctgcataattcagaagctaaacgacaagattaggaagaggcaatccgtttgacagaggtgttactggaatgatgaaaatcaaggtggtttttgttttttccctcttacattttgtggggaggtggttaagagagggctgaagaagaagagattcaaggagaactcggtttctaaaatttttctcttgggcccaaaacatacctaagaaacagattgccatatattaatttaattatttgcctattgaataataatgcccttcccatttgatgtgcagattgtagaaaggtgacagtagacattttattttattttatttattttttgagacagggcctcactctgtcactcaggctggagtgcagtggtgcgcatgtaagtaactgtagcctcaaagccctgggctcaggggatcctcctacctcagcctgttgcgtagctgggactacagatgtatggcaccacatccagctaattaaaaaaaaatttttttcagagacagcctgttgcctaggctgagtgatgaaattttaaaatgtgactccaaattatcggtttacttcagaattttttttaacattagggagatgttgtagtgattaatctcccttaaaatttttatgtgtgtatatgtgtatatatgtgtgtgtatacatatatatgtgtatatatatgtgtgtatatatatagtctggcggtcaacagttcctttaatttctctgcataaaaactaaatgatagtatataatgaagtgtaacattataattatatatgttatgttttatataatgtagagtatgatccattttttgtaaaactataagtttaaaaaaatactgattactgataatgagtgatacatatttctgggtgatgggatatggaatttttttttaacttttgctttatacatgtgtgctttgtttaatttttttgttgaaagcaaacacctattgcattgagggaatatattacaatcattgggaagagtattttgtcaggggtagaagccgtttatttattcattcagcaagcatgtgcttagtgtaaggtgtgtctgaagttgagtagacatttagtggagggtaagcccaaagagtccctgcccctttggaggtcaaggctttgtctgtccccatctgggaacagggactcttacagacacaattctctcccctttatcttacaaagtgcctgatgtagatcaatcaacccatgtccgctgacggtgttgtgaagaaatacgtagcgctgcacagtggccatgttttaatcgttctgcaatttagaaattcaaatgaatggccactgctttaaagagtcagaaccttccatatttaaaaaaaaatatgcatttctggttcttcttggaaaattggagtctggccaaacactgcattcccttcctatcaaggcaaggattgatgtgaagtagtggcttctgtcttcgcatgaggtatagcctatgtggttttccccagtccccaccacttcctagagtgttccccctacaaggaggctaagtatctgtttatcttcaggccatatattgtgttacacttgctcacttcccccattttttttttgtgacccaactgggtctttgaagcatttatgctttttgtcctgtatcttacaaccttgaaggataattttgaaaatgtttgtgttataaaattggaaactttgcactgttttgagaagaggagaggacaacatagaaagcaggacaaacctgtgacaggagaagtctcagcatttactttaaaggtgaaatctgagcccttactcctcaagtagggagtttggttggtgtgaagctgctggagaatgtgaaggcatcttcacaaacaagcaaaacaccagggaagaggggccacgttttgtggaattaacctaacttttcagctgtctttagcagttggggttacattatgttcccctgggttgtgtgtgtttcttctgcatcaggagagatccctgcccaccttcagagaaacttaataataaacaaagaatgtacatccaaacttccaaacttccttgttaatccgtctatttccttagttgaggttgagcttaatgccgtctcatctaatacacgtaacctctccggtatcaggggccaaggccaagcaggcaatttgcagataaagtcaaacataattaagcagtaaaaactctgaccatacaggtggaatgaatgaatccaccaattgtgatcctgccaccatcctcctgccctaaaactcaacttgcttttctcctgagaccttctgaatagcaggaaagctaagcacagactgtctgatcttcagaaagggaggggcaagccattgtcactggatgattgaattattccttgtctggaagcaggtcgtgaaccagatgatgtctcaggttcttccagcctgagaggttttagctgcttgtcctacagtgaggcagagggaatcgatagaaacatggtatgaaggtctatgctcagtttcttattagtttcattgcttaattcctgcttaagcatctgctgctattattggtgacaagagcttgtatttctgtctctagactttttgtttgtttttttactttaaaagattttatatttcttctccatctaggaacatgacaaagttagaaatcttacaaaggggccaggcatgatggctcatgcctgtagtcacagcactttgggaggctgagaccggtggatcacctgaggtcaggagttcgagaccagcctggccaacatggtgaaaccccatctctaccaaaaatacaaaacttagctaggcatggtggtgggcgcctttaatcccagctacttgggaggctgaggcaggagaatcaactgcacccaggaggtagaaattgcagtaagctgagatcacgcattgcattccggcctgggtgacaagagtgcaattctgtctgaaaaaaaaaaacaaaaaaacaaaaaaacaaaaaaaaaaaacaccaaaaaaaaaaaaaaaaagagaaaggaaggaaggaaagaaggaaggggaaagaaaggaaaggaaggaagaaagaaatcttacaaagggatcagacacagtggctcactcctataatcccagcactttaagaagctgagacaagaggatcacttgagcccaggagtttgagaccaggctgggtaatgtagcgagaccctgtctctacaaaaaattagctgggtgagatggtgcatgtctgtggtcccaactacttggtaggctgagctgggaggatcacttgaaccctggaaggttgaggctgcattgagctgtgattgtgccactgcactccagtgcctgggtgacacagtgagactccctctcaacaaaaaaaaagaaaagaaaagaaaagaaaaaaattaaaaaaggaatcttatgaagatctcgtaataatgcctgattcttcaaagacatgggcacagacttgtcagctccaggcagtccttaagtgaacggtgcaatagccctagaggtgtcagctcagctgataccactttctcttaggaaaacacaaggtctttttttgtgttttctttgagggggccttgcattccaagtgtgcagttgagaaactgaacgttacaggatcagctgaaccaagtagagggaagaaaccctttggttttgacactgaagaaaacacacatagcactggggcaaactactgatggaaaacatcaagaaagatcttagacccttactccaggggatgtggcctaacggcagactggacagtaaccatgagacagagtgtttttgcttccatgagacagagtgttttcttcttctttttttttttttttggttagtgcctgaaatctagttaacttttttttttttttttttgggatggagtctcgctttgtcgcccaggctggagggcagtggcacgatctccgctcactgcaagctccacctcctgggttcatgccattcttctacctcagcctcccaggtagctgagactacaggtgcccaccaccacacccggctaattttttgtacatttagtagagacagggtttcttcgtgttagccaggatggtcttgatctcctgaccacgtgatccacccgcctctgcctcccaaagtgctgggattacaggcgtgagccacctcgcccagccaatctagttaactcttggtcttctacatgtgttagaatggttttagctttattgacagaaaatttgaataagggtagcttcagcaatatgtcaggtccccgtttgtaaagcaagctgagagaagtacctcttttctctctaggtatggcctttcctatctttgagtttaggatagctattaaaaatggaaagttacactgggtcttgtaattgtgcttctaagaattgattttgtacataaatgtgaaacctatcaaataaataacattccatccacttaaaggaatacatcttttatttatttatttatttatttatttatttatttatttatttatttttaacagagtctcgctctgtcactcaggctggagtgaagtggcatggtctcagctcactgcaacctctgcctcccaggttcaagtaattctcatgtctcagcctccagagtagctaggattacaggcacacagcgccatgcctggctaagtttttgtatttttcttttttagtagagatggagttttgccatgttggccaggctagtcttgaactcttggcctcaagtgatctgccaacctcggcctcccaatgtgttgagattacaggtatgagccactgtcctcggccaatatgctgttaagaatgaaacaaaaatctttatatggtattgacgttgaaaaatacctaatatacattgttaattggtgaaaaaagttgtataatagtatatatactatgattacttttatgtaaaagaattgtatatagacacatttgtataggtaacatactatatatttttaaaatatgcaatacatatgctatacaatatttaaaattacagataggtacacatatatgtgtatgtatgcatttataaagcatatatccacggctgggtgttttggctcacccctgtaatcccagcactttgggaggccgaggtgggcagatcacttgaggtcaggagatcaagaccatcctggctaatatggtgaaaccctgtctctactaaaaatacaaaaaattagttgggcatggtggtgggcgcctgtagtcccagctacttgggaggctgaggctggagaatggcgtgaacccgggaggtggagcttgcagtgagctgagatcgtgccactgcactccagcctgggtgacagagtgagagtctgtcaaaaaaacaaacaaacaaacaaacaaaaaaaaaacccactaatatgataatggagtaatctgcgtttttataattgaagatttccatagataagacatactctttaattttttctccaagacatatgtaccctatttgtaacctgaaaaaggtaagaagaagagaccaatagtaaaaaaaagtctgttattaacgaagaattgaagggccacctacttagaatagtcgttttacataaagaggcagacctgaacggccttttcccttaataagtgaagtatgttaattttatattcactgttgtggtcacctggagacatccctgcgttgtaaccttgtaggcttttaaaaagttaagtcacatcttctgtgccaaaaagtacctcattttgaactaaaaccttcaaaatggaagtcttgttattgagtttgatgtctatttattgctatatatttgcatttaaatacagaaactatatatttttttcttttttatgacccagtgtgtctttggggatagctttatgagctctttcttgaacgcttaattatttctttctaggtggctttgtcataggctgtcatgcttcattgaggtatcagctcagctgatctgttccactttctcttaggaaaggcaccattttggggccttcagtgggtaacagatttctgaagcttctcttagccccattctggcaacactgggctgatttacaaccggcaatatggaaaacctcctagacagctgcctcagctgcatttgaactactgcctgagagtctctggctgccttgacactctaacagaccctggcggcaaggcaggtaccgccttctgctatgctgctgatcattgctgaaaagttgcgtaagtcatgccaattgtttataacatgtatttaagccgtgtatgaacctgggagtcatgagtctgtgctcttatttcaatgtaataaagagaagaagaaatactggatggtttaaatcattctgtgcttaagagcaaagctgagaaccaccccaacttgtatccctctccatccctttgtctactgagcgaaagcgcattcaccatgctcagtctctcactctaagccagggttctcaacctcatcactgttgacatttggaactggacagttctttgttatgggaggggatggggtcaggggatgtcccatgaattattggatgcttagcagcatcccagctctctacactctagatgccagtacaacccactctcctaatcatgagaaccaaaatggctctagatattgacaaatgtcccctgggaagcataatcacctctgcttgagaatcactgctctgtcagatgtcccacccatctctcatactcaaataagtgtttctttcactccaagagcatgagtgggtgccttgttcctagttcctcaaatgagacaaacccgttgtcattgagacgttgcatgtgtacctctctccttctctcccactgtctccatctctctcatgtttcccttcttgtacccaccagccctacattgatgtcttgttcttcagaatctttaatatgctagtatgcattaggaatctccaaggatgaaagagtaggagggagagggagaaggagagagagagggggagagggagaaggggagatggagaaagagagtgagggagaaagagtgagagtgagagggagagggacaggaagagagggagtggggagagggagagagggagaaggacagagaaggtgagagggagagcgacagggagaaaaggagagggggagagggagacagggagagagggaaaagtggagaggaagagagggagatggggagaaggagacagggagagggggagagggaggggggagaggcaaagtgggagaaggagggagaaggtgagagggagaaggagagggagaaagacagggagagggagagggacagggagagagggagaaggagagagggagaaggggagagggagaaggaaagggggagagggaaagagggagaaggagagagggagaaggagagggagaaggagaaggggagagagaaggagagagagagagagggagaaggggagggagagggagagggacagggagagggggagagggggagagggggagggggacagggaaagagaaagaaggagggagaaggcgaggggagaaggagagggagtgggaccgggagagaaggagagggggagagggagagggagagggacagggagagagggagagagggagagggagaaggagggagaaggagagaggaagagggacagggaaagagggagaaggggagaggtaaaaggaaatggagagggagaggggagaaggagagggagagggacggggagatggggagagagaaggagaggagaaggagagggagaggagtagaggggaagagagaaggagaagagaagaaggagagggagagggacagtgagagagggagagggggagagagaaggagaggaggataaggagagggagagggggagagacaaagaggggaagaaggagagggaagggagagagagaagggcagagggagagagggaaaaggagagggagagggagagagggagaggtagagagagacagagaggggagggggagaaggaaagggagagggacagggagagaaggagaaggggagagcaggagagacagaagaaaacaggcagagagggaggaggagagggagagggacagggagagaaggagagaaaggaagagagggagagggggagagggagagaaggagacagagtgtgcatgcccatatttttttctgagtttgtttatttcccatgaacgctcccccaaatcccttgggactagcagttgtaaacacaccattgagaacattgcattcctttcttttcttctagatacttttcctccattaaccttgtctttttccttcctgtagatttttgcagcacattttgtctctccctcccttatggattgtttatcctgggtgatgatctgtgggcacatctcattccctaggtgcacacagctcttcgaaagcaagtattctgtggtatttaacccagcctgttttcttacatggagaaaggactgcataaacatcccaatgggttgaatgtgtttataacccagtatgaatcaactcgccacatgcccactgaaaggatccacaagatggttgcagtggagtaaaaggcagtgataactctctaactgggaagatcacagccgtaaaaagaatgagatcatgtcctttgcagggacatggatggagctggagtccattgtccttagcaaactaacacaggaactgaaaaccaaatactgcatgttctcgcttgtaagagagagttaaatgataagaacacatgggcacatggaggggaataacgcacaccggggccttttggagggtggggagttggaagagggagagcatcatgaaaaataactaatgggtactgggcttaatacctgggtgctgaaataatctgaacaacaaccccccatgacacaagtttacctatggaacaaacctgcacatatacccctgaacgtaaaataaaagtataaaaaccccatacagattttaaccatctactagacagaggtgatttcttttattaggctgtattccctctgggtcctcacagagaaacaggcatgagaccatcacgatggctgaaagaacagattctagttaatagttttgccttttgccaacaccattagctccccctcttaatccgaactgctgtatcgctgaagagagtgaccctctgtatttggcttgattttgttgtcctgagtagcctctgctagaaatatccacaagccacagcttcagccttcgagtgagcaaaagcaaagtatccaacaaactcaaatggtaactcaatcctgaaatgctgtaactttgatttgtattttccttctttctttattttttattttttcgcttagacagatatccccttctagctgtgctctctgatcccacttttgtttgtctctttatttcctctgcctactctgcctgaaaactaaaaagcaaattcttttatttctcacgtatatgcctccgaatgatttattttttaaaatgcagcttcacttgaatgttgactttttgaaaactttccctatttcactttttttttttccgctctcccttggaagctcttctttgataatcaggctggtcttctgttctttctacttttcttctgatcgttcaccttttgcccacttaaactgaagccctttggtgtatgcttggaatttcggcagttcaagttcaaaagaaagccctcttcaggtaacctgttctgacatatccgcatcttaacacaaagctttgctagattaatgggttggctaaaaacgtctctttgcttcagtcatagtcacctctgtgtatgagggtagcctcgtgtctattcatttaggggattcttttttttttttttttttgtagaattcgtctgaatctagaagcaaatgttattttattgaatgtcccactttcagagatatatttgagaacaaaaatgttgccaaaaatgtctgaatactaccgtatttcctttattggagcatgcatgtgttttctgtattttaacttttctgaaaagagggaagctgaaaaaaaggggaggatgtctcctacagtctcagtgatctctcagaattgagaaaacgtgataatcaaacatttcagtattatcgggaccttcctgggactgagcacacgtgttgaggggagtaccagggaaataaggagcatggtgaggagttaatttgcagtttgattccccctgctcctttgcatccagaagaagactgtgcgcctcctgtcccaggcccctgggtgtacccacatcgtggtgcatcactttgcatgttgacgggctgagtaacctgcttgtctcttgggaccacttcatttctcactgtgcttcagtatcgcacagacacctgacacctagtaggccctcacaaatatgttgcataggctgggcacagtggctcgtgcctgtaatcccagcactttgggaggctaaggcgggtggatcacttgagaccaagggtttgagaccagccgggcgaacatggcaaaactctgtatctagtaaaactacaaacattagcctggtatggtggcgcatgattgttaatccgagctactcaggaagctgaggcatgagaatcacttaaaccggggaggtggaggttgtagtgagctgggatcctgccactgcattctagcctggaaggcagagtgagattctgtctcaaaaataataaaataaaaacgttgcatgaatgaaaagttgtgtaatcagttctgaaagaaattttaaaaggaatgtgtccttccctttggtgctgttagaatgagtcccatacacattatttttaaccagatcatttgttgagcccacgtgcattttcagtagaataatattaaaaatgcctgcccattctccttgagtatgccaggtgaattctagagtcattcattgagctaagactataaacaggactagtgaagtctttttatttatttatttatttatttatttacttatttatttattgttttttgagacacagtctcactctattgcccaggctggagtgcagtggcacaatctcggctcactgcgacacctgcctccagggttcaagtgattcttgtgccttagcctgccgagtagctgggactgcaggcacccaccaccacacctggctaatttttgtgtattttagtagagatgggattctaccctgtttgccaggctgatctcaaactcctggcctcaagtgatcctcccacctcggcctcccaaagtgctgggattacaggcatgcaccactgcgccggccttagtaaagtctttctcttgtttttaataagaggaaagcccagcttttgcttcacctagttcacaacacgcaggatatcattgttctacatggaaaatttgtgtccgtggaattaaataatataatccctgggaacttccactggttcccggtctccttcttcagatattttatctgctaaatccgaagtcggaatctcagttaagcttattagttaagtcccaaatggagacaattgaagccagaaaaaaaaaaaaaagaagaaggagaaaaagtcctaattatagtttttcttcttaagtgctgcatgcaagtatgaatagggtattaactgtggttttcaacataaaagcataatagtcagtagcacgtatgtcaaaatgtaggcatattagaggctgttaggtgactcaggggccacatctgtggaacaggtacatatttatcttgagataccgagtcattaagaggggcaataaaaaatcaagtgtaaattgagagcaaaggtcacaatctgtggttggtgattttttatatgtctagcaccagcccttgctactttttctttagaaaatgagggccgagtgcagtggctcacacctgtaatcccagcagtttgggaggctgaggtgggaggatcacttgagcccaggagctcaagaccagcctgggcaacactgggagactgcatcactgcaaaaatacgcacacaaaaaagtaatagttatcctgcggtcaccagggcccagctactctggaggtccaggaggtcgaggctgcagtgaaccatggttgtgccacgacactccagcctgggcagcataactgagttgggagggaaaaaagtagaaaatatgtctcggtcaagtctgagcttcattttctattgatccagtcgtggtcttttccaaggaaattattgtatggagtgaactcgggcaattcacttaacctctcaattgctttatctgtaaaatgagaataggctgagcgtggtggctcatgcttgtaatcccagcattttgggaggccgaggtgggcagatcacttgaggtcaggagttcaagaccagcctgaccaacatggtgaaaacctgtctctactaaaaatagaaaaaattagccagctgtggtgttgggtgccagtaatcccagctactcaggaggctgaggcaggagaatcacttgaacccagaaggcggaggttgcagtgagccgagattatgctatcgtgctccagattgggcaacaagagcaaaactgcatgtcaaaaaaacaaacaaacaaaaaagagaataaactaattctcgtatcgattgtgataatacatgaaaagctcttagcacaaatgtaacataagtattcagtaaataggtgtccgtgtgtgtgtatcatccatcatctactatttatctttctgtcttcatctgtcatctgtctgtttctatatgaatatataaatgtatttatctatatttttctatatgtacatatataagggtatttatcatttatctgtatatcatctatctcgatataggtatctatatgtgtgtgtatatatatacatctctgtgtgtctgtgggtgtgtgtatatgtatatatacattcatctatccatttatcgtctatttctccatacaaacagacacacataacatacatttactttcttgaattgctaaattgactaatgcagatacatgttcatttttgtcccatagatactaggcccacccctttattctttaagactcctttaacacaacctgttggatttagaagactccactgacactggagggattgaaacaagagaaaaggaggaattatacttggtaatagctttcatttctcctagattccctcagtcctgtagactatattgagttataagtctttgataatttgtaatttgtatcattaatatctctcagtcagtgagatcttttgattaaccaaaacacagtgaaatttctgaaaagcctgttttattgtagccataaactatgtttacagagctgtttcttctaagagcttcaaaatggtttgtggtgtgtgtttactgtagatgtatttttcattaaaaagtaagataatgctatgactaaccgcccccccccagtggaaaataatgaagaaaacaaaagcattcatcacagtacaatcagcattaaatttgtggtgcctttcttccaccctcagatgtattttttaatttatgtgcctatgatcataatgaacatttaacttttttaaaataaacattgtcctatatgaaccaagtaatctagtctctataatcataacttaaccttaacttgtaatggctatcaaatacttcactctgtgtgtgtgtgtgtatgtgtgtgtgtgtgtgtagctatataacatttaattgtcattatattaggtgaaattaaattttactctttttattctaaataatgccccaacgggtaactttttccatatttaaaattatctctttaggccatatttccagaagtgtaatcataggattagggaaatggaaatatcttgcacagtactttacatgtatttccaacttacttttcaaaagggtcatagcaatgtatataactactagcaatgcatataaatgctagtttctctacatcctcaccagccttgggttttataattactttacattttcctaatagaaactgtatcactgctgtttaatttgaatttcattactagtgaggttgattgtttttatatgcttaatctctgggttcatcttcctaatagaggcctgccttgtgttttaacaattcagctgcccagataacacttagagagccatgagtaaaagcactctgttaagcaaaacaaaagccacatatttccaaagactgtattgtataatttcaatatgagtcagtattccaatgtgtcatccaaacatttcctatcatttgttaatatgatcttaagctaaattaatgtattagtccattcttatactgctaataaagacatacctgacaatgggtaatttatgaaggaaagaggtttcactgactcacagttccacgtggctgggacacctcacagtcatggcagaaggtgaaggaggagcaaagtcacgtcttatgtggtggctggcaaagaaagcttgtgcagaggaactcccatctataaaaaccatcagatcttgtgaaacttagtaactaccacaagaacagtatgggggaaactgcccccatgatccagttttctccattttgtaccatccttgacccaagggaattattcaagatgaaatttgggtggggacacagccaaaccgtatcaaccaatatatgagaattgatttatttactttagtccctatcataagggaagcagtggtccttcttcatgtttcctcatgtcactttttaatgagcaagtcatgcacaagacaccatatttaagaagtatggaagggcacacagtgaaagatgagtgactgaagacatgtttatttccagcatgatgtctttccaaacaactagccaaatatgtagtccaatggaaatgaatgttttagactagagagatatttcttttataaaatacaatgttatgaaataactctcgtgggtctttggtattcaggtgtggcaaatactgttaatttgtaaatcaaaattatttctgaccttcttctataccttgctgtcttccgctctagaggctgaaagactaatttaaaaaatttcatgcaagcttgaaactttctggagacaaaaacataacaaaaagggttagacaagagtgatgtacgttttcccttccctccttctgcttgcctggagcatagaagtgataactggagctgtgacaattgcatcatgaccatgaggagaatgtcaggaggattgcagatacatcagctctgacatagcaaccatcggcttctagatgaggacttccctaactttagtgcacataacaatcacctgaaggctttgttaagccctggattgctgggcccctgttccagagactgtgattcagtgattcagtaggtcttgggtagaatgtaagaattttcttttcttttattattattattattattattattattattatgctttaagttttagggtacatgtgcacaatgtgcaggttagtcacatatgtatacatgtgccatggtggtgtgctgcacccattaactcgtcatttagcgttaggtatatctcctaatgctatccttccgccctacccccaccccacaacagtccccagagtgtgatgttccccttctgtgtccatgtgttctcattgttcaattcccatctatgagtgagaacatgcggtgtttggtttgttgtccttgcgatagtttactgagaatgatgatttccaatttcatccatgtccctacaaaggacatgaactcatcattttttatggctgcatagtattccatggtgtatatgtgccacattttcttaatccagtctatcattgttgtacatttgggttggttccaagtctttgctattgtggatagtgccacaataaacatacgtgtgcatgtgtctttatagcagcatgatttatagtcctttgggtatatacccagtaatgggatggctgggtcaaatggtatttctggttctagatccctgaggaatcgccacactgacttccacaatggttgaactagtttacagtcccaacaacagtgtaaaagtgttcctatttctccacatcctctccagcacctgttgtttcccgactttttaatgattgccattctaactggtgtgagatggtatctcattgtggttttgatttgcatttctctgatggccagtgatgatgatcattttttcatgtgtcttttggctgcataaatgtcttcttttgagaagtgtctgttcatatcctttgcccagtttttgttggggttgtttgtttttttcttgaaaatttgtttgagttcattgtagattctggatatcagccctttgtcagatgagtaggttgcgaaaattttctcccattttgtaggtcgcctgttcactctgatggtagtttcctttgctatgcagaagctctttagtttaattagatcccatttgtcaattttggcttttgttgccattgcttttggtgttttagacatgaagtccttgcccatgtctatgtcttgaatggtaatgcctaggttttcttctagggtttttatggtcttaggtctaacatttaagtctttaatccatcttgaattaatttttgtatgaggtgtaaggaagggatccagtttcagctttctccatatggctagccagttttcccagcactgtttattaaatagggactcctttccccattgcttgtttttgtcaggtttgtcaaagatcagatagttgtagatatgcggcgttatttctgagggctctgttctgttccattgatctatatctctgttttggtaccagtaccatgctgttttggttactgtagccttgtagtatagtttgaagtcaggtagcgtgatgcctccagctttgttcttttggcttaggattgacttggtgatgagggctcttttttggttccatatgaactttaaagtagttatttttttccaattctgtgaagaaagtcattggtagcttgatggggatggcattgaatctataaattaccttgggcagtatggccattttcacgatattgattctttctaaccatgagcatggaatgttcttctgtttgtatccttttttatttccttgagcagtggtttgtagttctccttgaagaggtccttcatgtcccttgtaagctggattcctaagtattttacaaattcttaggcagtgctgatgttgctggtctatggaccacacttggagtagtaagatgctcgattcattatgtgagaacaaaaaagccctatttttaaagtcactgcagttggtgttgcttgtaccctaaaaaaagtgaactgattcacctgctaggtctgcgtatttctgcttcatatgtaccacctactctagaaagagatgagattatcaatctaattgaatgtgtgtgaagatgacagaagcaacaatcagatggtcaaaagcagattaagaatcacttacttggccaggtgcggtggctcacgcccataatcccagcattttaggaagctgaggtgggtggatcacctgtggtcaggagtttgagaccagcctgaccaacatgggaaaccccatctctatttaatacaaaaaattagctgggtgtggtggtgggcacctgtaattctaccttcttgggaggctgaggcaagagaatcgcttgaacctgggaggtggaggttgtggtgagccaagattgtgccattacactccagcctgggcaacaagagcaaaactccatctcaaaaaaaaaaaaaaaaaaaaaaaaaatcactcactccaggaatttggggctgtccccagtcctgtgtaggctcctttccttctgggaagtgatggactacaagagaggtagagaacagtggaagagtttgaaggtgatctttaacaatggaaggaataacagctacaatcccaatacgtgctaactgaactgctaactgaagtaggagagttatatatatatatataaaatagtgcccctgttctgaaagcttggtatcaaaagctgcagggtttgatgtttagcaggaaagcattgctataacttgcgtatcttctaaaaaatgtgcccacatcctcccggtttgccttgggaacagagagaacttggttatgaagcccctttctccaaggattaattgaatcaagatcaaccctatctggaatgtacatttaatacccgggaatgatgtcagtaatatatgtaagagatttttatattagataactgctcattaaaagtcaatcctttcccccagggttttaaaatagaaagtattcaccttttgcaaatgaggatagtgaaatttactttaacttctgccacaatgaaaactggaagaaagggaattgctcacaatacaatataactccaccaaatttgcataatttaggcataaaatgtaataccctgctcacactcttttgtcttgaatgaaattggttttcaagtaatgtggggaatcataaccagctttaacaaaatggatcatgtcagaaagcaaaagttcctactagcctaggagacatgactgaagtgtgaatgcagtgtgcaacatctttacaaaagttgttcttgtgatttaatgcaaaagcctttgtagactttacagaaacactgaagccgtgctttttgatagttaatgggggaattaaccatttgaaaccttaagacaatctttttctaggattcttaaaatcatgggattgtaacaattctaaggatgttaaaagtgatatacattcctgcagttcctttccaaagatcacagagttctttgtgtaaattagtatttcccaggcctggtgcagtggctcatgcctgtaatcccagcactttgggaggccgaggtgggaggatcacctgaggtcaggaattcgagaccagcctgcaacatggtgaaacccagtctgtactaaaaatacaaaaaaaaaaaaaaaaaaaattagctgggcatggttgtgggtgcctgtaatcccaggtactcgggaggctgaggcaggagaatcacttgaacccgggaggtggaggttgcagtgagccaaaatcatgccattgcactccagcctcggcaacaagagtgaaactctgtctccaaaaaaaaaaaaaaaaacaaaaaaatatttccaataaattttcagcaatgtgaagtaagcctgtctatgtctttcctgtggcacaggtagtgaaactgaggtcaggaaaaggagtgcattgcccatgaccactcattgaagcggtgttcaagttttcaaggcacagactttctgaagcatattgtatgaattggtttttgatatattatggatagtgatatagtaaaggtatgaaagtcaaaagaattactcattgaaagcattggcctccaagagcattttctccccaaacctcttaaggggtttatatgaagtttaaatgttgatgttttccattatcttgctggctgtaggctttgaccctcactttctttcatctttaaaatgaagttgtaacagtatatgcctcatgtgtttcctgtgataattcaacagttaaaatgataatattgtggctggacatagtgccacacacctgtaatctcagcagtttgggcggtgaggcggctggattgcctgagctcaggagtttgagaccagcccggccaacatgatgaaaccccatctctactaaaaaaaaaaaaaaaaaaaatacaaaaattagctgggtgtggtagcaggcacctgtaatgccagctacttgggaggctgaggcaggataatcgcttgaatctgggaggcagaggttgcagtgagccgagattgtgccactgaactccagcgtaggtgacagggcgagactctgtctcaagaaaaaaaaaagtaatattattattactgcctcatatatctttttgttgcagacactattagctgtctaccctggccctcctcagaggtgagcatgaaccagaattccctggaggccctcttaaaacgcaccctcagagcgtttgattcagtgattctaaaacggagtctaagaatttgaattttttaaaagttctcatgtgttgccggtgctgcaggctttgggaccacattttcagaaagagtgttttctcttgtgaccattctccaatgttctgtgtttgttaggtgtgacaatgggtccatctagagcaaaaacaaacaacagtagcaaaccttgatttctcagggttttttttgcatttgggagtggccgtggagccagtgatacagaagtggaagtctgcagggtagggacagaagtgagcttgtacacaccttccagccacacgcccttctcctttcaggcttcctcttgcctggaagaagtatgctggtcagaaagtagggcagccatctatgaccatgagtccagaagccacactggacaatggaacaggaatattggagcataatgagttcctcaagaatagctgaagtagctctatagggccaacctccaaacttgtgttttgcgataaaaaatgaatatgtggttactaactatagaaatccttaactgaattatttctctcaggtacacacaaatcttttggacttcttattttaacaaaaggagaggtaaacagtagggaggttcctcaaaaaattaaaaatagaactaccatatgattcagcaacctcactgctggattatacatccaaagaaaatgaaatcaatatatcggagagatgtctgcactcctgtgtttattgcagcactattcaaactagccagggatatggccaggcacggtggctcacacctataatcccagccctttaggaagctgaggtgggtggatcacttgaggtcaggagttcgagaccagcctggccaacatggtgaaaccccatctctagtaaaaatacaaaaaatatctaggcttggtgacacgcgcctgtattcccagctactcggggccgggggagcagtgcttaggtgggagaatcgcttgaacctgggaggcagaggttgcggtgagctgagatcatgccactgccctccagcctgggtggcagaatgagactccttgtcaaaaataaaataaaataaaaactaaacaaaatagccaggatatggaaacaacctaagtgtccctgaacagatgaaaaggtaaagaaaatttttaacacacacacagacacacacacacacacacatacatatacatgccatgaaatacaattcagccttcaaaaaagaaggaaattctgccctttgcaacaatatggttgaacctggaggacattatgctaactgaactaagccagacatagaaagacaaatgctgcattatctaacttatatatggaatctaacagagtgagactcatagaaacagagtaaaatggtggttaccaagggctggtggctggcaggggagagttgttggtcgggtacaaaatttcaggtaggcgggaggagtaagttcaagagatctattgtacaatatggagaaatcatagttagtaccaatgtatggtgctcttgaaaatcaccgagtagattttaagtgttctcacacaaaacacaaggacgtgaaataatgtatatattagcctgatttagccattccacatgtatacatgtttgaaattttcatgttgtacctgataaacatatataattttatttgtcaattaaaaataattagaaacaaacaaaagtagaggtgaaggaaaaaagttcttggcgtttatattaaatgatgcacaaatcccctgctgtgccccacaattgttggaggacagtgggtggatgagacacacagaatagactcttccttggcccatcttattgagagaccatgttgtgcagcagtgtcatcctctgagacgtagttaagataaatgacatctccttaccttttaccccccgagactataatgtcattctgtagtctgaaaggtcatttgtaaagctcacaggattgctttagctgttaaaatagagagcaaaactcaaaagcaaacctctttctccaaggaaaatactatactttgaacagtctcatcgttctcctgtgattctaaaccagttcctctgcacgcagtgcagaaactagatctctcctgccactaggctcacaaggactcttgtggatctcgttttccccctatcttttgtcttacagtttccaccctcccttttgttctgtgtgtttgaatcaagaaccggcaaagcccacaatgatgtttgtgagcattaagtgacgcaaacacaataaaggattttgcttttttgagccgctcataaaaagagataaattgctttagctttttatgcatgtagaaaaatagagtatgagctaatagtactgactgaagaggaaccaggaagaaatttagtatgcatataaatttaatgcaaaataaaaagccaaatgtaaatattggtttccttccagattttcaaggcttaaaaaaaaaaaaaataagattttctttgcttgttatatttctgctgatggaaaacatcctttccactgttggaaaatgaatagttataaatatagaatacatatatcttagactcggtggtctttaaaattaagagtttggacttttcttttgatagaatgtggcatgtagcatatcgcatgtcttagaatattatttgtcctcgcgaaagtgatcctcatcccttattttaaaggaaaagaaaaggtatgattctccttttgtgcattcagtacacaaaaaattgcctgttatctagggtgtacttgactatggatctccttttaagtcaagactacacttacatgatggaaataataatggaaaattgtagataataataaatatatttttactccatcttcttcttaaaagactttatcgcagagagcaaatagcttttccctttgcaaaaacaagatgctagaagcatagaagagatgaagttaagcaattagtgattggaatgagttgatcttttaatttttttaaataacaataatcaccaatctcgattggacacttactatatgcttggtaattcatgtgtattaactcagttaataattataacaatgttgttataattataaggaaaaaatatttattatctccgtttcacacatgagagaattggggctttaactaatatgcctctgatcacgctattattctgtggagtgctcagaatggaaggtcagaccaccgcgttctaaaacttttgcttttaacctggtagtgtattagtcagtgtctgctgcatcaaaccgccccaaagcctagaggcttaaaaccaccatttattcaactcacaattccgtgggtcaacagtttggactaggatcagctgggtggaggagtgagcagaagtataaagaggtctgatgagggagtgagattagcagcttaatttcttcacgcataacaattcaaggggaccttcatttgcctgattgagcaaatatcttatgcggatagcttaaggaaagagctgcacacctgggctgtgaccttctgggagatgaagtccaaggacatttttagatatggatacgcatagtacaaagagatggaatagaaatgctaaagaaacatatacataaactccttggtgtggatgattcactcactgactgtatcgtgtgccatcctttatgcagacagtgtcaaatgttggtagaaaatgaagtagatgtagccctctgactttataggggcttgcagtctgggaggagaaatagtgaaccagtaaactgttacatcagtgaccacttgtggtacatgttaggtatgaaatagactatccagatagaaactaattaaagaagggtctatttgggtaagttggccaggaaaggttttttggacgaatgataattaagctgaaatctgaatgttgagaagggtacagtcaaggaaaaggaagtcggggctgttttagagatagaggggtgtgtgtgtgtatgtgtttgtgtgtgtgtgtgtgtgtgtaggtgtgtgtgtgtgtgtgtgttccttataagccaacaggtaccgaatttagtgtaggtctaagggatatgttgaaagatgaaggttataagtggaggtttccgtgtttaaattcagtgatgagactctctagctcttctcattttcttaaatgttgcccaaagaatcccataaacatggaaggaatcctacccaggtgctatataaagataaggatagggagcctcttggagatataattgaggagcaccagatggggagtaagatttggcttctcatgttggcattaacgctaatttaccatgtgtccttggcaagggcactctgcctgtccagaatttagttgcctaggctacagtgattgcctgttctgaatggttgatgagagctatgtggagaaaagagtctgaggccacttacaatcactgtgagccagaattctgtaattgattaggcatgtctgccctggacttggaaggagcaagtggtgttgtgtatgctgtatatgtgccattctctgatggccttttattttccagcacaatgttttctatggcttttatgactaattggaaaaattctgtagctttccagtttttttttttttttttttttgtcctggtattttaaaaatgcagcaataattgaaaacaatgagggaggaaaataaatacatcaaaacaatagtctgtacacttacttcaaagggatcaaataaagcaaattatgcacgggagggaggtggatttgtacttccctcgtttgcaatattattagtgtgattaatatacaaagaccaatatttcctgaaattcataatttgccctattcctccgtgagctttgtgtttcccagaataatcatgctgatccatttccttaaaaatgtattgaatgcctaagtgctcattttgcaagggcagcagcataattggacacagtggggaaacagcagagaagtggtttgcttcctgaggagaggagaatgtggtgtgagtaccggctggacggaatgtcacaccaggagggacctcatctctgcaccagtgtcactgagcagaatgcttaagggctatttatggaattagggctggaaaactgcagctaattctcaaagaagggagggcttccctggattataaaatatgtgttcttttgaataatgggaccgaatgagagtagaatgtttcagcatttttttcctaacatgacagccctttggggatcctggtgattttacaactggatttcatcttcatgaaattctgttatgtgtgatcgtttctgctccacccttccccttaaatagtcactttaaaagcatctctatcttgccttggagattgactttcttgttccagttgtctagaaaagtatttctatagtgtgagctttagaaactaggaacagaggaggaagatcggagtccttaggttcaaacctatttaaggtccgtgctctgccttgtgcctgcctgtctctgagtttctcttaatgcttttccaaaacagttcattaatgcagtgacctcgaggtcttgctcagatttgcttccacttggactggtgatgagaattgctggtgaagctgggtccctatgtgtttgcaggtctgtttagtagactcaacttctgcacatgtagcatccacatgtccagtctcttctgtgagatgtggacagcgtcagtgccagcataagggaatcagggtttgagaactctcaatatgggcagggtagccgtactgtgtaaacccatggagcgccattcccattgaattctacatcgtctgctcatcactatgtaggccccgatacagatctaacagggaaattcttgtagtttactgaggcagggccagctgctgggtgagatagagagagatgaggctggaaagtgggtatgagcccgatcacaaagcaggttatgtattgtgattgggtttggaatttattctgaattcacttgccgtcagtggcatttcagagaggcccctttagctgcacttgaaaggatgagttagagaagccccaaactggagggaagatacattaagacatgattgcagggtgaggtttctgttaattccttgcatctctatggctagcaccatcctgatccaaaccaccatctcccccgggtggttgcagtggggatctgacgaacccctgcaccccactcgtccccacctccacaccgcaacccaaacagcctgattatattaccccataggcagcctttcagggacagggagttcacattgctctcaggaaggagacaaaaatccttcgtgtgggtggaggcaaggtcttgcaagatttaaatgtcctcaccctctacattgttcactaagtctccacaccacaccagtcgccttgattttttatcaaagaaatggggtctcactgtgccacccagcctggagcacagtagagcaatcatagctcactgcagcctccacctcctggcctcaagtgatcctcctgcctcagcctcccaaagtgctgggattacagacatgagccaccatgcccatcccaactttattttttttccatccgtcctccatgttctctgtcactaaatgtggttcactctctctggaactttcctaaaccattttattacccctgtcttagtctattttgtgctcccataatagaatacctgagactgagtaactgataaagaacagaaatgtattttatcacagtttcagaagctgggaagtccaagatcgaggcaatagaaggttccatgtctggtgagagctgcatcctctggaggggaagaatgccgtgtcctcacatggcagatgggcaggctggccaaacactgtaaagcttcttttataagagcattcatcccactcatgaggggaggagcctgtatgaaccagtcacctcttaaagcccccacctcttttcaccatcacagtggcattaagtctcattgcccttcaccacgcacttgtttaacttgcttaatttttatttattctcaaaattcctgcccactgtcaattttttacagaagctaaatttcccctgtgttatctatcgaaaagcaagtatctctcctttttggcatttagttcagttgtaaatttacatttgtttatgtgattctttgattattatcttccttccaaaactgtaagtcccatgaggataggggctatttttattggatccttatcatttacccttcctgccacttagcatggtgatgtctcataaccagcagcattcagaaatagttttgaaagaatggataagagacagtagaagtctgaatgaaggcttcaggaataggagcagagaaatggggtggatgtgtggggttggtactttctgtgtcttaatgttctggagaataatgactctcaggtttttatctgggtgactcagtaatggtggcattgtaaacttaagtaggaatttttgaaggaaaacaaggttagaaatgaatacaacaaaggggccttttcatggtgaagaagttctgcatcttgattttggttgaggttacatggatctatacatacacatgaaccacacatacgcatgaactacacacagacacacacacacacacacaggcacacatgcagtgaaatgtgaacaaggtctgtagattgcactagtatcggtttccttgtttggatatttggttacaggtttggaaaatgtttccattgggggaaactgggtaaattgtgcataggaggactctgtaccacttttgcagattcctttgagcctgtaattatttcaaaataaaggtaaaaagagagggatctaaagattggcagggacattggtaaattcagtttgcaggatatggaatataatttgctccttacagactccactaagacctcacctctcctttttgactcaattattggcctgaaattcttgttggctcttcttgcattctaagagtgcagggctctgctgacctgtccacctggctttgttttcacccttcttccatgtggtcattcacatctcggaaggcctaactcccctcctccacacagaatgaatcacaaggtgcaatacttactttccacctattcagcagcataaaaagtccaagcaggtaggattccctccctttccaccagccccagctgtctgtctgtctgtgtgccatgccgcatatctacccagaggaaaagaggtcatcatatgaaaaagacacttgcacatgcctgtctatagcagcacaatttgcaattgcaaaaatatagaaccagcccaaatgcccatcagctgagtggataaagaaactgtggtgtgtgtgtgcgtgtatgtatgtgtgtgtgtgtgtgtgtgtgtgtgtgtgtgtgtgtatacatgatgggatatttatacatatatatatacttacatatatatatacacatatgtatatgataggatgctacttagccataaaaaggaatgaattaatggcattcacagtgatctgaatgagattggagactattactctaagtgaagtaactcaggaatggaaaaccaaacgtggtatgttctcacgcatagtgggagctaagctacgaggatgcaaaggcacaagaatgatacaatggactctggggactcaggaggaaagggtgagaaaggggtgagggataaaatactacaaattgggtgcagtgtatactgctcgggtgatgggtgccccaaaatctcacaaatcaccattaaagaatttactcatgtaaccaaccacctgttccccaataacctatggaaataaaaaaaattcaaaaaataaagtaggaaagaatgacactgacaaaatctataggaaatgggaggctatttgctggactagagtttctcataggcatgatttattccattgcttaaaagcaaaacatattccatactttatttttctaataaagaagagcaacatctgacttttactgagctcagtatgcctttgttgttgaaagagcaagctctggagtcagccctgattgaattcaaatcctggcaccaccaccttgaccttgggaaaactactgcatctcactttgtcctggtcccatttgtgaaacaggactaatagtacctaactcataatctgtggaaatcagctacaatgatgagctccaagagcttagcagagtacctgaaatacaggaaatacccagtaaatattagcctttattatgatgtttatttttttttttttgaggcagagtctcactctgtccctcaggctggagtgcagcagcgccatctcggctcactgcaacctctgtctcctgggttcaagtgactcccctgcctcagtcacccaagtagcagggattacaggcacgtgtcaccatgcctggctaatttgtttatttatttatttttgtatttttagtagaggtggggtttcaccatgttgtccaggctggtctcaaactcctgagctcggatgatccacccacctcagactcctaaagtgctgggattacaggtgtgagccaccacgtctggccttattatgatgtatttttgccagatgctttttgtgtgttatgtccacacgttttaaaaatgtatccgtaagagcaactttacccattggatattttattcctatagtgtaagtgaggaaatagaggctcagagtattcaagccatatgcccaaggtcacacagtggcacattgtaccatggagattacaactcaagtctatttggccccattgtaggtcacaatattctatttcatctctaaacaaactcaggggaccctagcattataaatgcaaaagaatgtttaatgcagataattcctcagcaaaatggagtgtctaaggaagtcttcgggtttgcttttgttctgcctgagccaaaatcatggtacttactaaaatcttactggaagtccctaaaatcttactggcaagggtacttttattacgaacacatcttcctataaatttcgttaggtatttcgtctttgttatcttgctaaagcagaaggctgttgttctggaatgtgaaatttatgaaattgcaatgttagaaggtggaagtaaatcctacttttccctgtggaagaagtttgagaggcagtgcttgggcaagtttcatccttatatggccaggtctgaccctataaaggtgaagggctattatagtggggttcagagaggtaagccaacgtgcctcaggttacctaactagtaactgagccccactttcatcagttctaaaaccagaaaaagaaatacctgccttattgggaggccaacacaggtggattacgaggtcaggagttcaagaccagccttgccaagatggtgaaacctcgtctttactaaaaatacaaaaattagtggggcgtggtggtgagagcctgtaatcccagctacttgggagggtggggaagagaattgtttgaaccagggagatggaggttacagtgagccacgatcacaccactacactccagcctgggcgacagagtgagactccatctcaaaaataaaacaaaataaaattaaaattaaattaaatgaaattaaattaaacaaagaaatacctgccttatggctggatgcgttggcacacacctgtaatcccagcactttgggaggccaaggtgggcgggtcaggagggcaagaaatggagatcatcctggtcaacatgtgaaaccctgcctctacaaaaagtacaaaaattagccgggcgtggtgatgcgtgcctgtagtcccagctactcgggaggctgaggcaggagaatgacttgaacctgggaggcagagattgcagtaagctgaaatcgcgccactgtactccagtctgggtgacagaatgagactctgtctcaaaaaaaaaaaaaaaaaaaaagaaagaaaagcctgccttatagggttgttgggaattagaaatgtctgtgaagtatctgccacttagatgacataaaaatattgctattacagtgatggcattaggtctgcattcacagtggaattacagtatggccaggcatattataatgaaggtttttaactttcttagaaacgaaatttgtccttttgaaactccctcttcaggtttgcccttaatccaggaacctctatcacattacaggcgcccagcagcacatcttaatatatgttaattccctttatttctgatactggagaatttaaatagtgactctcctcgtaggatgcctcctggcatggtggaaattgccagaagacaaaataacagattttatggtacttcgctgtggtttttccatatgtccaaaccctatccgtagctttcatgacccagataaagtgtcattaagtatgtattagtgattctcaaccctggcttcaaattcgaatcagttgggaatgcattaaaaactatcaaaatttggccgcactccacaccaaacaaatgagaatcccagcagctttatgctttttttattctctggtttttattgtttgcaatgtcttgctcttgttacatttttctgactgactatttttttaaaatgtttttaatgtttaatttttgtggttgtatatatttatggggtacatgagatgttttgatatagacgtgcaatgtgaaataattttatcacggagaatgtggtctccatcccctcaagcatttattctttgttttataaacatccaattatattattttagttatttaaaatgtaccgttaacttatttttgaccatagtcaccctgttgtgctgtaaggtagtaggtcttattcattctttcttactatttttttttgtacccattaacttattttttacaagctccttagttaagtgattttaacatgaaatcaaaggtaagaacctctaatataaagcttaccctaaagcccaccccattcccacagcatacactgtccaccatcatgtcgcttattcaatgattggaataaataacggtatgaatgaatgaatagccctctaggtcactaaatgatggtcatcttgtgctttgctttgatgttcgtcttatctttaatctcccctcgcagacttgagatacttcttacagtccttgttggggttatttctgggccccaccgtgtccgaagggaccacagtgtccaagggagagtatatggtcagtaaatgcttgtcatatgaatgaaaaatttatcatgaatacccgtcccatggcactcatggcagaattgttaatggagtcccacctgttaagaataacttattcttctccaactgactctttttttttttttttttttttttttttttctgagatagagtcttgctctttcacccaggctggagtgcagtggcacaacctcggcttactgcatcctccgccacctggttcaagcagttctcctgcctcagcctcctgagtagctgggactacaggcacccaccaccatgtccagctaatttttgtgtttttagtagagacgggggtttcaccatgttgaccaggctggtcttgaactcctgacctcatgatccgcctgccttggcctcccaaagtgctgggattacaggggtgagccaccatgcccagcctccacctgactgttaaaacattttctttttttgaattgatacgacagactttattgacatcataaaaataggtacgtgagtgtctgatatagtttgggtagttgtccccgcccatatctcatgttgaagtgtaatccccaatggtggggggtgtttcggttgtgggagtggatctctcaaggtgggaggtgtttcggtcatcggagtggatctctcaaggcttggtgctgtcttcatgacagtgagtgagttctcatgagatctggtcatttaaacgcatctcgctctactcctttttccatcattgccatgtaagatgccatgtcctgcttcaccttccgccatgagtgaaagttccttgaggccttcccagaagccaaacagatgagagtgccatgcttcctatacagcctgcagaaccttgagttaactaaacatcttttcttcataaattacccagtctcaggtatttctttatagcagtgcaagagtggcctaacacggtgtcctatatggggactaattgtctccaaggttattgaggtagttcttcagcttatcttaaagtaactgttggctttcatctctggatggtgtgtagtgtgggtgggaagaaccaactaagctccagattagttgatgcatggtgagggagtgaaccttcctcccctccttgcttgaaggtaccccaggccctcactcaggcatgaaggtgcaaactcactctttggcacaattttcaaactcttcatcatcttatactttgtctgcaagtacaaacccctactgaaacttcaccccaggccctttcccaatataaaccttgcttgaccacatgcagctgcccacaattatcactgacttcatttttatgattttctttttcctaaaaaaaaaatgccattgctgtagggaaggggttcacatttgcagaacactgacgtcttggctacttacaactcagccacatttggacttttctattccatttggtcagtctccaactctttcttgattcacctgatattttcagtcagaaatatgcacacgttatgcagttttccctttttcaatttactttctcaccatgaagttcccattgacctctccctgttcactgtactctgtgacatcacacattgtgtttctaccgactcaccctgatgtttttcccctttaccgtagatactccttctgaccacctcctctgatcaatacttcgcattcataataaggtgtattgatgtacatatgcacaaaacatctttcataactactcaacttatccctcctggaaataaaacccaatctcaacagtctttggatatcaataattaatgtagaggaaagcccagcaccccaacgcccctgccagagataaaaataagcgaaatatgcaaattcccgttcagacggggcactattgtaatgtgcaatgaagccatgcctatttaaaacaacaacaaaaaatgaatctggcctatggattgctggaatgttgctggcacaattcttgctgtcctcatgggtggcagacgtttaaaatgtggaagatgaaacatactgttgtgagcattgaacatcgcattacgaacgtgctcatggtacttaataaattgtcaaaaataataagactgctgccaagtctgaaagctataaatagctaaaaaaaaatcagacatgactgctgtggattcttttgaaagataattttcctcgtaagtaatttctatgagcaagagcaatacacagttagatggtaaagtctacattcctggctcctgaaatgaacagcctgtgaattagaatgctcccaaagacgtggtgttaaatagagttgcaactacagggtggccattacattaagtaatttaatgaacactgatactgaggaaataaatcaaatgcaaacaatcaacaccaatcaaggaagctgagcatttcaggcacttaaaatgtattaaatgagtgtttcaatcacagtgggtagtttttcacaaactctcttaatcagctagcatcattctcaacaaagtgcccatgcatgtaaacatggtgaactgcaaaagcccaacacattgacacatggacacttttaggaatggaaattctgcttagggttttcactgataggataaacaacagcagataaattgggaaaggtcagtggaagtcaatgttgtgaaacagaaaagaacattcatattttgcatgtagttaaaaaaataagaatttcaaacatagaataaaatttgaaattgaattccaggcagctaatgcacctcccaaaggtggtttttaatgtatctttgcgtaaaatttccattcatgtataagtcctgataggtgcatctttatttgtatatttattatgtgtacatgttatatgcatatatagttatcagtactataagactgataagtacattctctctatatataagtatatgttgtttattcaaacaggatcatatccaagctcactgcctttgctacttaatcaaatatctatcatgatctttccctatcagcctgtataggtctatggtctattgcattctgctcaaggttttcttttttttaaaaaaagtctttattttattttatttttttgtggagacaggatctcactatgttgcccaggctggtctcaaactcctggccataaataatcctcccacttaggcctcccaaattgctgggagtacaggtatgagctacagcgcctggcctggttggaataatattttactgtatgagtccatcatcacttatgcaactctctgcttgttaggcatttacgttcagtttgagagaggataatttattgcaaacacacacacacacacacacacacacacacacacattccttaaaatgtattattttatttcattctccttcaagtattagcattgcatctttttatagcctgtgaaactagggaagagagaggttaagtaatttgccagaaggcacccagataataaacacataacccttgttttaagcccagatgtccttttaattctgaccctatgcctttaatcactacactgaaggttgagtttttaaccaatgttaaaactttatcagagtcgtgatatatgtgtatacacttcaaaagatgtgtatgtttggaaatattgaagaaatatatgtccttgttttgttttctttctagagaaaaagccaggtacattactgtaatcaaaaggggtttctgaattgtaagagatactatcattgttaacagagagtgaaggtaaatattcccactcatgtaagagtcttatgatattcttattagtagctgcagttggataaattgatatttatacgtgtgtctgtgtgtgtgtgtgtgtgtgtgtttatgtacagtttcctctaggagaaagctttttcatttgaaaacattaggtgagttagaagtgctttgcttgttctttcatttccactctacatcttcacatctttgaagagattttgttctttgtactttcaaagaattttagttgaattgggagaaataaaagtattttgattctttaaactccaagtacttctggaggtttggaaagcatattccaatgttcttccaataatgcctgttataagtgcacttacagtcatggtgctgctgtttaagcttacggtttatgaggagacctgctttccagctgcagcctccctccctccacactcctgagggaggcatcttctgtgttatcctgcccaacagtcagtcctcgttcagcaagaagcagggtatcatgtcctctaatcatggtccgtatagactcgggtcaggtggacccacctcagattcccctgtggcccgtaacccgggcctgtctcatcagagcatcccaacccctgacctcagtgcatggcttggggatgagaacctggttcagccaggctggtgccactccattcagaaattgctgggggccctagcaccttggtttggttggtaggagttgtgatggtgggaacttagagtcgtcatggctccagtgatgggagatcctgcctgagatgaaagaccatccagaggggagtatatctgagatgaagagaggacgtgtccagaggccattgtatcaacactcatgttggatctgtaagacacccttcaatgtttagttgtataagccagtaaactccttctcattacactcctttaatgaagttttagttggattttcttgcacattatctcttagagccgtgagtgatgcagtcttctctcatttagggagttgtatttccatatatcttgccatctttactaaattccttggagaaactttgactttttaatataaaataaatacagtctatcactccattatcccttctagtctaccttctcagtcactgtcaacatttttttttttttaactaaaatggagatttggttatatccctccttccagcaaaaatgttagtggcatgccatttcctgcagaatgaaatccacgtgtttttgtttggcggtcaaggcctttggacatctgctcaacccagccttcaaatctcagtgtctcactcacctgcagtctttgttccagggagatcagagagtccaccctagctcaagatagcatgccctctgcctctagggataacatggtctgcagtgcaacatctagcaggttttacagttgggtatccaagtttggcgtgtgtctctgtaacttcatacttttttgtttttttgagatggagtctccctctgtagcccaggctggagtgcagtggtgcgatctcagctcactgcaatgttcgcctcttgggtcccagttcaagcaattctcctgcctcagcctcccgagtagctgggattacaggcatgtgccaccactcctagctaattattgtatttttagtagagacgggatttcaccatgttggctaggctggtcttgaactcctgacctcgtgatccaccttccttgacctcccaaagtgctgggattacaggcgtgagccaacacacccggcaaacttcatacttttgttcatgcttttggtgtgctgttttctccttcacggatttgtctctcctgctggtctgttttgccacattctggtgtcctttggcaaactgaatacccagttttgttttgttttgttttgttttgttttgttttgtttttcgttctggagtccttagtacctctgacagtatgatatttattatatttgatcagagtaccaattaatattaatattcttcctcgtcctcttgtttgatggtttcttggcagaagctatatcttccctgggatgcagaacattgctgaatcatagtagaaactgataggtgtatgtgaatgaactcacaaataaatgcgtgattgaatgaataatgcactttttaacctctatttctttgtaagcaagtcatgtgggttcatgaatataagcagaaatgatggctttaaattttttttcttatttgcgctttcttgtaggctttcattgctttaatgaaatctggccctgaataccttgccaaatacgttttccttgaggatattgataatggctttttatggttatttaagactccctctaaggccatgtatctgcaccaataattccagttttcatttatctattcattcacttttattaagcactttgtagagtgcagaccctggaccagaccacagcagaccaatgacaagatagcatgccctttgcctctagggataccacggtctgcagtgcaacatctagcaggttttacggttggacctgtttctttattgccctctacacactaataataatacaaataaccttctgtgtgctagagtagtggtaggtgctttgtatgcactcttgatgattctcttaacaactcttagtggtgttagaattctttcttcatgaagcagggcacaaaagctctgagaactaaagacacctgagaataacatctgcagctactcagcagtgaaacaagaatttaaaccaagttgtatttgaagccaaagccactacactgtaattccattccttggtcattccctgccttcatcaggatctccgcttggttttgttgagacacagagtatcttattctcatgtccttattcatagctttaagctctcttaagcctactcaaactatttcagtcaaaatatgcagtttacttttccctctcttttttctaaatgctctttaacttcaatgtcccagctttcttagaggtcctgtatatctgaataatcagaattattgtggttttaagtaacagaaacccagtttacagtagttttaacaaaacaacaaaacccaaatgactgtaggatgtattgaatcatggagctgagatcctcatcatggtggctcacagaatcaaatgcatgactcgtgaagtaagggtgtctaaggctgtacctcaagctttgtgactggaactgatggcttggagtttctgggacattctctcttgccaatatctacttgtttccagctcttagtgggctatagttactcttgctgtagacagacatcctccaagtagccaaggaagagtgagcaggcaattccaacattttatcttttaagcatcatgatctcccctttccccaaaagcaagggattgcaagtaacagaaccccatgccagctccagcataaaaattcctgggaaggactccagttggcttggctttgagctcacccatcacccaaactttgaggctaggaagaagagtgttactatgattggcagctctgtggtaacaccatgggttggaaaagtaattggccaaaaggaaaaggggtgattccaccagaagagagaaaatgagaaaatatgccaggatgcaaaatgttagatgtcacagtcatctatggaggcaagtgtcagactttgtgttagtataactgcggactggatagggagcgtttgtccaggctggtgctgccgcggtctctatcttgtttcctaaactccagtccattgtaggctgggcattgtggctcacgcctataatcccagcactttagatggctgaggcgggcggatcacctgaggtcaggagtttgagaccagcctggccaacatggtgaaaccctgtctctactaaaaatgcctaaaactagccaggtgtggtggcagatgcctataatcccagccgcttgggaggctgagacaggagaatcgcttgaacccaggaagtagaggttgtggtgagtcgagattgcaccattttactccagcctgggcaacaagagtggaactccatctcaaactaacaaactaaaaaaaattctgaccactgtagcattggtcactttcaatcatatcaaggtttagatcagaaatgatatagctactataacaattaaattcagtatgtgaaattgcaactgtcttggaaacgtcagagactcactttcttccccttgtctcccaggatcttgctggacgtgtaatagttacccagccttcaatggattgaggagcaacccaggacagtggacaaagccttggtcttgaatcacgtggtctcttctcttgttcagactttggcagctggtcacatgtgtgatttggaccctattacatcaaccataaaatgattgaagaaccagacatgctgtctttttcacagaagattagggagaggcagttagctcatgaatgagaaaatataatataatttgaacagttctgcagtcattaagatagtggtagtaacagccaatatgcatgttgaatgcttagtctgtatagcctgttgtgccaagctttgtgcaagaattactttattttatctgcaaaacaaccctacaggagtcatagttattatctctgtatcagagatacaaacactagagcatagagaagcaaagatacttgccaaagtcatgtagcaaaaacttgtcaaagctaggattcaaactcagatcctagtccttccccaccaggcaaggctgaattactctacagagagagagtgagtgcgtgcgagagacagagagggagagagaaaattctttcctagctctgccttatttctctggctctgatgataggaaagcagtggccacattgtcataagctccagtcactctccaagatggcagaacattccaacactggttaatggctctgggatcatcccatattgagggacatccatccctttgtgttctgacattgatgttactgtcagttgacagtgagctttatcatcaatcccttcaagtacaaaaggccactgttcagaaactgttattaaaagcagcctctctttttaaaagccgtctctcttttattccttccataataggagccagtgtaccagaagaggctgaccttaagttgcgcctgtttagttaaacaaacaacaaaaaaaaggaaatagaataggttatgtttttaatgtatttaagattggaggcctagaattagaatggaactgggggtgggaggagaggtggaaggcaggataggaaaaaagagaggtggccttggattttctttgcttttggataatgggcatttctagttaaatcaacacagtctatttcacagcctgtctcccggtgatgtatatactctttggacagtgttgtgggctgcctaaagatctcttttagccatgggacatgggtataaataagctttatgtagtcacagctactaagagcaatgtgcgtagagtatattctgaaaggagagggcaggatgctcattgtcatggcggatgaggtcaagagagaagggggaagatccccgagggatgcaaattggggagggttttaccaaacaaacttcctccagggtttttattcacattttaatacactttggggggaggtattttaattttaaaaagatgcatgtgatggaggggtgatttgatatagaggttaagtatgggttttataattgggcttccgagattcaaattcagctctgccatgtatgagtcaaagaagtcacatgcatattatttaacctctttgtgtctgtcttcgcatccatagccacatgcattagctgtgaatattaaatacgtcaacacatgaaaagagcttacaagagcacctggcacacggggagtgctcagagagcatttgctgttattacttgcattgtctgggtgctttctatgtacgaggtactgaaggaacagtggtggatgagacagccacagtctgcctccatgagccgtatgttcatagattaaaataaggcaacaaacataaattgatcattatacattttgagaatgctgtgaagggccctcagttgggattagtccagcccccactcccctccccaccaacctactcaagatcgttaagaaagacttccatgagaaggtagcatatgggcaaagatcaaatgcatgaccagctatgggaccaacacaccaatggaaggaaacagaagatgcataggttttgagagcaggaaaaaaagagacttgtgaccataatcccagcactttgggaggccgaggcagatggatcacgaggtcaggagttcaagaccaggctggccaagatggtgaaaccccgtgtctattaataatacaaaaattagccagacatggttttgggtgcctgtaatcccagctactcgggagactgaggcagagaatagcttgaacccgggaggcagagattgtagtgagccaagatcgtgccactgcactccagcttgggcgacagagggagactccatctcaaaaaaacaaacaaacaaaaaaacaaaaaccagaggagagactggtattttagaggacctgaaagcagccagcataggtagagagtagtgatcaggcagggagtggcccctgtggaggtaaggcatgcaggcaaaggtgagatctagccagggcatccatgccaagtgatgacatgattttaatcttagaatgatgggaaaacactgggaaggttgaagagtgtcctgatcagcttcacattttttttctttttttttttttttattatactttaagttttagggtacgtgtgcacaatgtgcaggttagttacatatgtatacatgtgccatgttggtgtgctgcacccagtaactcgtcgtttaacattaggtatatctccaactgctgtccctccccactccccctaccccacaataggcccacattttaaggttactctggcagtggagcaggaaatggcttgtaggtgcggtagaaaggccaaaaggaggttcttgcagctgactaagcaggaggtgatgttaagttagcccaggcacgtggcagggtgagaacagccccttgcagataaggcatgctggttcagctctgtgttctcttcaccctgcttacctaaccaccttcatctgctgttgcttagttgcttgctttcaccaggctataagagcagggactatctttttttcccttcttctttatacattctgtttctagtcctgtgtcaaactcaggctaggtgctcagtatgtgtttaatggatgaaatatgcagtccactgctcattagaatgtttaattttgcaagcccatattattagaatattaagcgaactacctcatgactaggaaagtcactcctcttgacattgcaatgtttgtgatgcggaggtgggattctagattatctttatgtcaaagaaaatgagcaatgctatggaccttgggcagagcacaggcagtacatggcttggcaatgtattttctgtaggaagatgtccccttagctccttatctgtggtatttcaaccaggagccctagttaattttcatgcaggagaagcctttgaaacccaggcctcttttatgctctgggaagatttgagaggggtcatccctgtttagattggttctctgcaccagtcggggaagcctgccggctgttctcagcatggagtatgttgcagagaggaaacagaccagagaaccagggcacttcccagcttgaatcaggcctgtcttgtgtgggttcattattttgttggaaattaatcccccaaatggcagacatagtatatttgaatgtgaactgaccgtgcattgcttggccaagtgagagtggtttttggattatccaacctggttgattgtccctgtctctgaacccttccattagtgtagataattgaaagatacctgattttgttttttcacacccaatttgatgtccttatggcgtttgagatggggtggggagtgtgagatggtcagaatcagcttgctgtcatttgcaatggaagcggtgaagtttgcaaacagcagtaccacttaatgagagcttgtcatgatatagccattgtgttcagctcttaatcttaatgaccacattcactcctcacaacaaccctacagtaataataacactagcacttatttggcatttactatgtgtcaggtgctgttctaaacactgacaagtattaactaacttaactcacaaaacaaaccccagagagtgagagtcacatggactaggatctgcacagcacccttgatattaaactggggggaagccctgcttgtgacatgggtaccattattattctcctgttacaggaagttcagaggggttaagtcacctgcccaaagtcacacagtcagtgtgtggagggggcaggaactgaactaaggtccttaggtctccaaagtccccttgctttcttttcattgcagcagcctaagaaccaaaagttagatatttattatacatgggtttggggctctttacagtatgatagaaaaatatactgctttgctaaagcctccccctaccccttggaggtagggggagagagagagaaaaagagagagaaaaaaatgagaatagcaatgccagctaaaactctgctcgaagcacagagtttggtgcatcagtacatgtgagttaagggaacaaccaaattacaaattaaatgaatgaaaaaactggacccaaactgatgcttcctcttcatgctgcccctaatgacgtagctggagtcacttcacttcgggacttctcaaagccctgcctctccttgccagagatttacgtccagtctgaggatcgtttaaacttcctcctctgtccaggattctgtgaccttacttacaaggcggctgtctgctttctcctaaattctgtctcctggttccgaactcattatttctgatccaaccaattctgtaatgtcagcctgtgtaacataatggaaaaacaaacttagggtaaaggaactccagcgagaattttaggtctccttgcttgatggaggttcgtggccctgagcatttctaagcatcctcatgttcttctccaacttcccctatgacagtccagtcctccacatggggaagagaatgttttatctgtacctgtctttggttttgcgtccctgcacccatcccgcaacttgatagaaaaggcagagagcccttctgccatttcttctctcaatacgcccccaccctaaacctgaaaagaagaaaggtaaaatgggctattcaatgaggagtctaggtgttgggaagaagaatctatttcgaggatctgaaattggaacctgcatcagaccttaggataaagataattatcatgtgcagaaaattcaattaaaaacaaaacaaaaaagaagaaaaagcatcttccaagttgttcttaaagtgtagttttgcaatgactatcactgaaaagtaagtgtggagatctgttcagttctgtaattgagttgggaagtcgacccgaaggaattccaaaagccccagttggccagaagaacaggatatgataggatgctgttgatctgctttcgtttccatgccaaggtgttttgttttgttttgttttgttttgtttttggtaaacttccattcatgactgtgtacagccagaagccagtaggacaacagtggctttgtaaatttgcaacagatattcaaacaagataagtacataattagcatggagcagcagatgaggtagtgtggaagatttaaattctgcgtagggaattagcaaacagttcctgataaccacattctgaacatgttgctgttcgatgggtgtgaatggatcgtgtaggcacagcccatctagatggctaataatagaagggattgttcaagaacaacaatgtattgtgtgcttaccatgtgacaggtaatatgctagactacttagtgatataatgctttcttcgtaatatctctgtgaggtaggaactattataatccacttttacagataagggtgctgaatctctgattgttgaagggacataaccctgccatctctccttcttgatctatatatgtatctctatctatctctatcatacacacacttacatctctaatgaatggcaaagcttggatttgaatacaggtctcatctaactccaaattctatttctcctagaggaagttcaacatgagggatttcgacaaaaaggttgttaaaagcagtctgattgactttcacctaacagatctttccttcatcatcgccatcattttagctctctgcaaagtcatcacatctgtcactgacgttgcacctactttgacacaagctgtgggctacgcaacttgcatgcatgaactcctggggaactcacagcaaaccttcataggtaggcaccattatcctgatgtctgactcaggtgagaagccagaggctcgttttccaaagtcacatacgtagaggtcctgccaggacccaaatttggtgactctgagtcctacattttgcacttttataaccacacactcttttgttttccaatcaaagcttgatcaatggttgatgatagatagatagatggatagatggatggatggatggatggatagatagataatagttaaaagaaatagatgtgtgtgtgtgtgcatgtgtgtgtgtgtgtgtgtgtgtgtatatatatatatatgtacctatacagaatatatacctgtatccatatctatataaatttggaattcaaaattgtgctgtctttctctttcttctgagtcgtctgaccagcttgctgcatttgcagccgccacagtgcatttaactccttgcttgcattggtattcctctttggagcagccccgtcacaacagcaattggaataaaaccccaaagagtagtgcagagaatataaatgggttatttttcacctcaactcaagtaggacagaactcttataaagaaccagggaacaaaggttccatgacaaacatacaccaggggactttagctctctctgatacagcctgtgtgacataatggaaagacaaacttacgatcaaggaattccagtgagaattttaggttgccttccttgatggaggttcgtgggcctgtgtgtttgtaagcaccctcgtcaatagcatttatcgaatatctactctgtaagtgaggctactggatattgcctgtctgtataggttatcatgcagtgagcctggatccatgtgaactaaacagatgtattcagggagaacgtttatctctctaaataagcaattgtttatcaacaatataaatatctatctacataagtgattgtttttatcaaaatcatgagaatcattaaagagaatttacggcaatgagattggaaataagagctttctggataattaaaagctgatgtgaaattaaatcttttattttcaaaggcagagtagcagagtgcttaaggatatgggattggtaataacccttgctgagtttgaagcttgatcccaaggtcataccatcttgggcaaggtgactatgtattcttaaacttggtttattttctgtggtaggaagacattttaacatctgtgcaaccttcataaacctttgactgatgcaatctagtctctgcgtgaaattccattcaatgggggaaagcaatacaaaatgttaaaactgaacattttttaaattttaaagcattttgaaaaacctcttttaaaattaacataaattaaaacaatatatttctgtcttctgaaaaatatacatgtgaaaggaaattcaattcattatttttagtaacacttctcatgtcctctttcctgccctgttctctgggatttacatggtgcaacaactttttcttggctttccccccatgcccacccccactgtctaccgttgacccattcagattctctccctttatttcccagattattaaaatatatatggttttggccttttttcagtcagtgcttttattccttctcttcttccttccatctctcccaccccttccttttatgtcattcttaaagttcagcatcacatatgtccgcggacctgtttttcagctcagcaggctggggagagagataaacaagaaagaaagtctgtggattagaagggtggtgagaacctggaaacatttccatatcaatactttttggtttaatcaccccatttgctttgacttctacctgtcaacagcacacaatgaagaccaagccacagagcctccattcccaggcatgggaaaactctgtgggtagttgagatgcagcagtacccaggttcacttggggcccttttctccatggtcctgataggacagatgagatgcgaaaggatggctggtattttgctcggccaagaggtgaaagggcacaggacaggaggagagtggaggaaatgcaagttggtgtgaagctgtagctctggtgagaataatgtatgagatgagtgcatgcatggtgattttgactataagacccaagaggacccctcctcatacaaatggatacaggtgggtgccaacaggaggaatgcgctgttcagtgtcctataaggttagcaatcatgtcagttttcaaagtccacagagaagtggtgcctgtggtcaacctggaagtatgacggattggataaagaaaatatgacatatatacatcatggaatactatgcagccgtaaaaaaagaatgagttcatgtcctttgcagggacatggatgaagctggaaaccgtcgttctcaccaactaacacaggaacaaaaaacgaaacaccgcatgttctcactgataagagggagttgaacaatgagaatacatggatacagggaggagaacgtcacacaccggggcctgtacttggtggggtgcaaagggagggagagcgttaggacaaatacctaatgcatgcggggcttaaaacctagatgacacgttgatgggtgcagcaaaccaccatggcacatgtatatctatgtaacctgcacattctgcatgtgtatcccagaacgtaaagttaaataaataagtaaataaataaatggaaaaaatgaaagtaggatcatttccacatagcagtctcttatctgtaacaaatatatatatatgtgtgtatatatatatatatgtatatatatatgtatatatatatatacgtatatatatgtatatgtatatgtgtatatatatgtatatatatatgtgtatatatatatgtatatatatgtgtatatatatatgtatatatatatgtgtgtatatatatatgtatatatatatatgtatatatataaggcagtcagaaagaaaggatggtccaagaaggggaagaggttgggtaagaggactgaggcagaaggaggcaggcatgcccaaggtcacctggaacccctgacccttcgagagcagagttcatccttggagccctgggacagagatgtgaatcagagaagttgatgagaccagattgtatggatttggaaagttagtctaagtctttgaacttgacattggttgcagttgtgaattttgaaaagcgattaaaccgatataatcaatatgtcaacatgtgcttaggacaggtgctggcagtctcagcaccactgacactttagccagaacacttttgctgtgggatgctgccctgtgcattttaggacacttcgtagcatccccggctgccactcatgacatgccagcagtgtcttcctctcccgttttgacaaccaaaaatgtccccagacattgactaatgttccctgggaagaaaatcacctttggttgagaaactctcatttaggaagatactgctaagagcagtatgtgggatggatagaaggcatatgaaaccagaagcaagaggaccccttagaaggctgtagtaaaacttaggtggagaagtcctaataatgtgtgcaccccaaagcgtaaaccttacacctgcattccatgagtagatgtgagatttgtaggaactttgagaaagaagaatgactggttggagtatttagcaggaagcacaggggtcattttttgatgtattttatttattgaatgatttggttacttatttttctttttttaatttcattttaagttccaggatacatgtgcaggacatgcaggtttgttccacaggtaaacatgtgccacagtggtttgctgcacctatgaacccctcacctaggtattaagccctgcatgtgctagctatttatcccgatgctctccctccccatgatgtattttatttttctgaatctattaaaaatggcccctcagccaaaggagcaataaattcactcccagcagggatgttagccaaatctcttttccccattcaaattaaaagacagcatcaacaatatttgatgttgaatttcttcttcttctttttttttaaacttttaagttcaggggcacacgtgcaggtttgttacataggtacacttttgtcctgggggtttgtcgtacagttgattttgttgcccaggtttaaacttactacccattagttatttttcctgatcctctcccacttcccatcctccaccctgaagtagacaccactgtctgttgttcccttctatgtgtccatgtgttctcataattcagttcccatttataagtgagaccatgcggtatttggttttctattcctgcattagttggttaaggacaatggcctccagctccttccatgttcctgaaaaggacatgatcatgttcttttttatggctgcatagtattccataatggatatgcgctacattttcttaatccactctatcattaatgggcatttaggttgtttccatgtcttttctactgtgaatagtgctgcagtgaacatacacatggatgtgtctttatactagaatgatttatattcctttcggtatatccccagtaatgggattgctgagtcagatggtagttctcttttttggtctttgaggaatcgccacactgccttctacaaaggttgaactaatttacactcccaccaacagtgtgtaagcattccctttgtgtccgcatgatgttgagtttcttaataaaattcccatgcccttatcccatcatcttttgtaacgttttatttatttttaaaactccttacaattgtccatttttgtctagggtttactcagttcttcactgccagctggccattaaagacatttggaaagaaaaatgctgatgcaactgtgctcttgtacatattgcataatcaaccaaaatagccccagaagtgattatgcttgaagctacaatgacagcaaagatacactgtcattcaccttgaccccatttgagatcatatcatttactcaagttcattgtgtttctaaaacaacaatttctcttagaatgagtgtgtttttgattgtgtgcccgtgtgtgcacatgagcatgagtgcatgtaccgatgaattttacactctgtttccaaataatcttccatcacaattctgtttatctcactcctctgctcaaaaaccttcagtggctccctattgcttatcagatcaactccagggcagtgtcatactgaataccttccatggcccaaactctgttttcctaatttcatcttgtcctgcaatattttctgcatttcactttttaactaagcaggataattgtttaaatgtttatagtatcaacagggggactatagttaataatcattccattgtagatttaaaaataactaagagagtttagttggattgtttgcaacacaagggatgcatgcttgaagagatggagaccccattttacatgacgtgattattattcatttcatgcctgtatcaaaacatctcatgtaccccataaagatatacagctatctatccacaaaaatgaaaatttaaaaacatttaaatgtttataaaaatgaagaaatgaatcaatgcaattccgagttcatttacaacattagatgactgatacagaataacaagatatagactttcttatgctcactttctaaatcaaaattgttatttgcttctgacagggtattcggtatttaattttactatgtcagacaggaaatctagagctgaacatttcaagtgtgcgtgtttatgaatttttcattaattactctgactgaaattggatacaagcctagcttagaagatcacccattgcttatttactcagattgttatccaggtcacctactatccagtgaaatctatcattattcctttacttttgcttgtttcatttgccacatgctttgctggaggtcttttcagtctccctcctctcctctctagccgttaggcagagttcaataactgatgtcttgaaaaacttcatcaggactcacagcctaagcaagtgaaataagctgccttcttggtcagtggagacagatattttcatgtgtctctgtgtccactttcttcttttaaataaacttgtgcaagaactaggtaaaatatctttcttctttctctctcctcaaactcactttgccttcctgattcacctccatgagttcccttttatagtttctgggacttggggagggtggcccagtagcgacgaaagtgcaagtggattggtgactgaaaaatatctgcgatcatgtacgtagaacaaataaagataaaaacactggggccgggtgcagtggcttatgcctgtaatagcagcactttgggaagccaaggcggatggatcacctgaggtcaggagttcgagaccagcctggcaaacatgctgagacgccatttgtactaaaaatacaaaaaaaagtagccaggcctggtggtgcacacctgtagtcccagctactcaggaggctgaggcaggagaattgcttgaacccgagagatggagggtgctgtgagctgagatcgtgccactgaactctagtcttggtgacagagtgagactgtctcaaaaaaaaaaaaaaaaagctgatgaaaataagtccattcccactttcaaatctctgcacatggcccttttaaaacaattcctttatcttcgtgagaaatggcatttgagttttcgaattctagtaaatagccaccactgtaaatctgcaggctcttgatcctagatagccattgcctctacagaaatctgttgagctgagggaaagttctcccattgaaaataattctgtactttacatgcagcctgtggtccctgacaattgatatattgccgcagaattaaacacgcttttctttgtcattgctgggcagagatgactttggtttatgaatgttccagattactttctacctgcctgtctctgctgagtacagagaagtttcatgacccagtgcctccatctgattccagatgacacatggatgaccccaaaatgttgcagccaggttggaatgaagtgggccagattgggaaggacttgactggattgaaatggagtgggctagactgggatggagtggaacagaatggtagagagaaatcagcccataggttttaattaaaagccattgagaaatggcttttaattaaatatctgtattaagatatatataaagaaggcatggcatgcatccaggccaggcatggtggctcatgcctgtaatcccagcactttgggaggccgaggcaggtggatcacttgaggtcacgagtttgaggccagcctggccaacatggtgaaaccccatctgtactactgataatacaaaaatgagccaggcgtggttgtgcacacctgtaatctcagctactccaggggctgaggcaagagaatcgcttgaacctgggaggcagaggttgcagttaggtgagattgtatgacttccttccagcctgggcaacagtgcaagaccctgtctcaaaaaaaaggaaagaaaaaaagaaaagaaagcatgcactctttgagaaaatgagataatgttgctgagaaggagagtaatgttgattttccctctggacatggacaaaatatatctgtgcatatatattaaaattatgaagactatcttttgcttagagtgctatcatcaacttgtataacttgcaatgtgttaaacctctgcacaagagggagaaattacctggaatatacaattttttaaaaccccacaaattacagtcactttctgcctagggttgtgaacagatgactgcaaggagtttggctttcacattcccagtggatgagagaaaaattggcaattgtttcttcccttccaaaaagcagaaaagtcctggcatatcctcattgtgtgtgtttcaccaaaatcagtgtctttgagtcctggtgttagcctcatctttcagtttttccatcttgaggaaggttgtttttttctctacctagtaccaaaatagtacgtcaaagcaaaagcaacttccaaacaactggctgttccagcctctcccagatgtcagatgatgagtgtgattgttttagtggctcagacatgccctgtgagagttattatgactgtacagcagacaaacagaaacaggctgctgagccatttgctgggtcatccttgtcctgggaatcgagccttctcagccagtccatcaagcttcaccagtttcatctctgtaaatgtccacattatggtgttttctttgcccattggatcagcgaggctgtgagtgacagaaaactcaggaaaacagtggcttttaaaagttaaaagtaggctttcttcagtccaggcatggtggcttagcttctaatcccagcactttgggaggctgaggcaggtggatcacttgagatcaggagttcgagaccagcctggccaacatgatgaaaccccgtctttactaaaaataccaaaaaacaaaacaaaacaaaaacaaaaacaaaaaaaacctagctgggcatggtggcacacatcgataatcccagatacttgggaggctgaggcatgagagttgcttgaacccagagacaaaggatgcagtgagccaagctcacaccatcgtactccagcctgggcaacagagtgaggctctgtctcagaaaaacaaaaaaaaaagaaagaaagatggatattttctttttaaataaggtgaaacgtagagatgacaaagacagaggtgcagagactccttgacttcccttctattgcggtattccaccatccagaactcttggtttctgccttcccatccaagacagtggcttgatttcggccatcataccctcattcagatgggcaggaaagagaatcgggaaagttaagtcacatttcctctctttaagggtacttcctggaagctgcatgtaccaatttcacttacatttcattatcccgaaattagtcacatgggtacctctacctgcaaaggaggcttggaaaaaagtagtagatattatggcggtggggggtggtgagtgtgccctgctgaagaattgagtctcttcttaagaaaaaaaggagagatggggaggaatatgacactgtttgcctcatccatattgagggaggcagtgttcactgcagcagcatctcataaacattggttaaaactatgcgtttgtagttattttgctgtcaactggattgcaacatctttcccaacaattgattgctcacttttattttcccactttcattcggcctggattatgttatgttctgggaagaatcggaacaaagggttgagggctgtgatttattatttaaagtttaggtgggaagaataggaacagagaaagatgtctctgccagctgggattgtgtcttgctcatctttgattttccttgcaacctcagtgctcctttatccaaggaagcgcccattctaagtaccagggtcacagtgggcaacaaggcaggccatctcacaaccctcatggaaataacagatcaaggtaagtaccatcaaggagattaatgggatgaagttgcaaagaggcactgaggccgggagagggcccgctttagatgtggagtagacagggaaggccactttgagatgacatctgatttgtagcctgaaggatgagattaaagtcacccactcaaagaaccagggagagagctgtaatgtgcccaagactgaaatggggaaaagtttggtgtgtttaggagaacacagagtgcgcctgtgggttgaaatgggttgaaatgagaaagagatgccttatatagagaagatgtcttatggttctgctcaatattggagggtcatactttctgcttccccaggaattttgtttgaaatccatttgtgtagaagttcttagtcaccccagtcttagctggaatcattctagcatagaattgaatttgagcattgagaattcatgctcaaactgtggggccggtgtgggatggcaaggagaatgatatctatgttttcacgggagggtataaagagagaggctctgataaacacattcaattggttgggggaaaaaagtaaacttatttggaggtacatttctggaatcgcctgatttgaactgagcagtgcagcctccatttatgaaaccatttctctgaatgtttcttttttccaatctgtcttccattctgacagatgtggcatatcttgtgcccaattcaacaagaactagtctccctcccttcctgtctctctctctccttccttggagcttagagcttctgctagtgtctgctcctttcctagttggcatggtagttgctccatttgtttttgtaaattgaggaattttctttttgtttgtaaatttgtcattatctcctacaaagcaccctgccatggttttttaaatatcttgatgtcttcacattggaagcaccactccatctgtgaactagatgcttccatcccaaaatgccattccaaaggagaaagttggaaccaaaagtgttggtagcagtggccaccaccagcaacatccactattacaggattaataggaattaaatctgcttcagctgtgaagtgagccaaagctttacttgcaagtggggctaaaacatttttttttaaggatttaccttaggtaaattgttctagactattttgactttaatttgctgagggtgaatttgcaatggggattcgataaccttactttcatagagtctcaaaacttatagttacacaacttcttctactgcctgcccattgctttgggttccttttcttgcaagttgcaatttgtttggtttttcagtgttctcttggataatccatctggatcactttgactaccaattttgcagcttcctgtcatgaaaggagaaaaactgaggtccaaggaagtatgcaaccgtttccataaccatgccatatccctgcatgaacttggcttgactttctcccagtgaagttgcactgggtatgcagtgggctccagagtcatcaaagtggctgttgcccttaaatagtcattgcattatactgttctcttgttggaaacccgtcaaatagtcttaaactgaagttcaaatgctcccactggctggtaggacagtgagtgatcagattgcatcaggcccatcggttctcattgcttaccattcacctcctcgctcacatcactacagccacagggcccttctctgcagacctcagacccaccacattctcttcctcttcaggaccttttgctcatactctccccaccgctaatgtgctcttccccttccttgtcttcagtaatccggatcactggatagaagccacaccccttggaaagcagtccctgaggcctaagtgccaggcaggtgctcagctcttttttgcagcctatgttgtcttttcttagcatgccactgaaacttctaactatctgattagtttttttgttttatttctgtcttgctcaggaaatttcttttccttgattacctctgagtccatggcatatgacctaacatgtagtaaatgtgcagtgagcattggttgaataattgagcgaaggaactccgagttctgtgtgtgggaaccgactctgataagagcaaacgcttgacacccaacctcgtcctgcctcccatgccgcatcaccctatttccaatattgtgggtggggctgatggttcaaagatgtacttcattccatttcctttttccctacaagccattcaacaaccataacggagacagttatctggggctattttctagatgttagacacgaggaaacctgaaaggaacattatgctcttcgcacactcacgtgtttgtctggttaccctcgggcctctccaagtggccctattttttttttgacattttgtttttttgtttgtttgtttggggtttttgtgagacagaatcttgctttgtcacctaggctggagtgcagtggtgcagtctcggctcactacaacctctgcctcccaagttcaagtgattctcctgcctcagcctcccgagtagctgggattacaggtgagcaccaccgtgcccagctaatttttgtatttgtagtagagacggggtttcaccatgttggccaggctggtctcaaactcctgacctcaagtgatccacccacctcggcctcccagagtgctgggattacaggtatgagccactgtgcccggccagtttgacattttgcatagcttacaacatttattaaacatttaaagacctgaagccttcttaaattagtgtttctcaagcccttcttgtgcaggatatgtgcgtcaaccaccaaattagctttggtgcacccagcgtgggaaaaggagcttttctttaccatgttagctctctcaactgccttccttgtacttttagcttcagcctttttgaaccaactactctgaattcttcagaatccctctgtctctcttccttctgccccctcttctgcccagattcttcttgctccctctcctcctcacttcttgtacatttgaaaaccctgtcttcctagaagagtcataccactttctcttcacatgcagcatccttcctggtattgtgggtccatggtaggtttattattccttactaaacattctggcttctctttttgtggtatttcttactgcaggaggatttttacatccccatcaggaatggccatacatcttacttcagctaatgaaacgtgggggaagtgagatgtgtcacttctgggcggaagctttaagagcctctatctgactcaacttattctcttctcccactgtggagagatcagtgagtcacttctctatcagcctggacccttgagagaagatgacatgtagcaaagccatagctaaaagacagccaacacatagcctagtgagaaataaatcttcactgctgcaagctaccaaaagtctgaggtcagttgttactgcagcgtctagcccatcctgaatgatattccgttgtgtctcagaagccatttctttgtaaaaccttccaagtctctagcagaatctcagaatctaagagtcttagaatctatttactaacaggccagacacaattgctcacgcctgtaatcccagccttttgggtggcctaggcaggcagatcacttgaggtcaggagttcgagaccagcctggccaacatggtgaaaccccatctctactaaagatacaaaaatcagtcagtcatggtggcacgcgcctgtaatcccagctactcagggggctgaggcaggagagtcccttgaacccaggaggcgaaggttgcagtgagctgagatcgcgccattgcactccagcctgggtgacagtgcaagactctgtctaaaaaaaaaaaaaagaagaagaagaagaagaatctatttaataacagaatcctagaagaaccttagaatgttagaatccttaaagtctgttgcttttatcatgtgttcccatggcattccctcataattagtttttttgtctgtcttctgtatgacattcagttctgtgcaggcaggaagcttgattgattcgcttctgaattccatactcttagcagagtgccttatgattggcattcagtaaatcactgtgactgaaagcaaatggagcagtgcaaagagatttctggctccaccaccatcatgaatatttttgatgggataggttctagtgaaaagcggtatccacctctatggaaacatggtggtgtttgaagagttccccacagccacacaaaatggaggcacccacttggaactgaattgattatttatggcaaactctggatcccagtcaggaatctgaaaaagggggaaaaaaatctggggcagtgatcaaaggaaaagtatttggagtatatgggcagaaaaaaaactgtcagagatattaatttaaattcacaattcatacactaacaccgtaggatcatgtttcttaggtcaatgaactctactcatattatttggtgatttgtttgacctctcctgataaaccccgatttcactatctcctatgtgtccctcctcttctgttccttataggacttgaggggtgtccccttggcttcttatctctttctctgtagcctaagagaaatagaccatggatatatccagttgcaatggaatccagttgattcctttgtgaaaacgagcaacagtcctttctttagcagagaagctagagtcttatctgacagatttctttttttaccataagtttttctgaaggtatgggtggaagactgcaaaaccctgaacatcaacaagcttcagtgttgcagatactaggagagatctactcctaaaaccaacaatcaaaacttctgtttttttccctttttcccatgaaagagtcaactgaattcgggtacaagtcgcttagatttaccaagtatgataaccaggtgtgtggctattctgagcatccatagctgaaacccacaggttggacatcctgtgacagtttcttagcctgcaaagaacagtgagcatgaaagctttaaatgggctattacctttttatatttatcccaaactgctaaggtcagcattaaaatttgaccttttccctgccaacccgtttgaagtaattaacccctgtgtcttgaaacacaaggaagctatgactttgttattaaattctcataaagagcctattaatattaaaattgcttcactcttgggctgaatgtattaatggccttgcactgggtaaacacaaaccctcagctcagtgttttaaaatgcatgagttgagggcagagcatgttcttccagctaccttttctgtagcagaacgttatgccttttgtgacagtttcctctccaatttgttcaaatgcttttgttttgaatctgtgtccctagatttacatctctttatggggaaactcatttccctgctagcaggtatggagcaggtcgaatggaggagaactcccgtgatgacctctgctcccatcaccctaatcatcgccttccaggacagtgctcagaccctaactgtcttggtatgaagcacagcttgtgattattcttttagtgggtccaagatagctgtgttcaagcacctgtgaaatgtgcttaaaaatgcagaggtacgcaatccagcatagacctcctgaatcagaattgacagagatgagaccttcctgaatctgcagtataaattaaattctcaagggtttactctagtaaaccctactgtgaacctgactatagttcagtttgttaattcaatcattcaaaatatgcatcgaacagttattatatgccagggtttatggccttgggaatacagtggaaaattgaaagagtcaggtgtttgttcttagggatcttacagttcatcgaagaaacacacaacacacaaacatgcaagtaaataattaaaaatagttataagtggacttctggaaagatgaagtaaacattttttccctgttcctccaacagagaacaaacaaaatgcctaaacagaagtgcagtcttcccgcagtatcagtgggggactggttccaggacagtccaaaatccatggatgttcaagttcctgatataaaatggcatagtgtttgcatataacctaaaaacatcctcctgtatgctttgtggggacatatctctcacttcaagcatttatcattttatttgtgtcatctgatatactttaaaacatctttacattacttataatacctaacataatataaatgctacgtaagctatgtcagcaagagggacaacaacaataagcattagtatgacagatttctcttctctgctgttttcaaaattatgctgtatgcttaagcaaaaattatactgtctgatgtgattggtgaatatgtaagtagtaaatagttgttatactgtcatttaatttgtattatttttattgtattgttatttatttttaaatttttggaatatttttgatgtgtggttggtagcatctgtggatatagaacccatggatatagagggctgactggatatagtttcaaatcactgagtaaatcccaagtcagattaactgaaggaaatccacaccaagtcacatgatagtcaaacttctgaaaagtcaaggcaacgaaaacatcttggaagtaacgagagtaaaatgcacgccatccttataggaggaaacccatttgaaagagaacagatttctcatcagaagccacagagtcaaataagaaatggtgttttccaagtgctgaaagaaaatacttgtcaactcagaattctgtattgagtgaaaatctccttcggagatgaaggagaaatcaagacattttcagatgaagaaaaactaaaagaattggttggcagctggtctaccttaaaagaatggctgaaagaaattttctaaacagaaaggaaaggataaaagcaggaattttagaacatcagcaaggaggaaaacaaaaatagccattaatatgataaattttccttctctggtgttttcaaaattatgctttatctttaagcaaaaattataataccatctgatgtgattcaaaatacaagtagtaggaagatttaagacaattatattttaaatggggagaggaagggaacataaagggagttaagatttccacacttcattcaaactggtgaaaacatagcaccaggctgtgacaagttatgtatgtatattgcactacctagataactgctaaaaaaatctgtaaaaggagattcactcaaacagactataggcaaattaaaatttaattatgaaaatatttcagcaacctagagaaaggcagaaaaggcaaactgaaaaacacaacagaaagaacaaataaaaaaaaaagaataaagtggcaaaattaagcactaacataccaataattacattaaatggcaatggcctatatacaccctttgtaagagattgttagagtggattaaagtatacaacctaactatatgctgttgacaagaaactcctttcaaatttaatagtataggtagactgaaagtaaaaggatggaaaaaagatagagtatggaaacatcaatcaaaagaaagtaggagtagctatattatcagataaagtagatttaagagcaaaaaaaaaaaaaaacaactagaaatagagacgatatgtaatgatacagtgatacagtgtcagtccaacaagaatagcattcctaaatgtgcactcattaaacacagagctacacaatatatgaagaaagaaatatataactcaaaggagaaatggaagaatatcacaattatagtcagaggctaaacactattaggaattaataggaaaactagactgaaaatcagaaggataaagaacaatgcaaccattatccatcaacgaggactaatcaacattatagaacactcccaatgacagcagaaggcgtttctttttcatgtccatgggagatatcctgggccataaaacaaagtttaacaaatttaaaataattgaaatgatacagtgaccacaatggaattgagttataaattaataccagaaagataacaggagaatctgcaaacatttggccactagacagcacattgccgaataaattccatggattaaagaaggagtctccaggaaaataaataagtgtattgggcagaatgaatgtggaaatacatcacaatttgtgggacacagctaaagtaatactgagaggaaatttatagcaataaatgaatacattagagaagaggaaaagcttcaaatcactaatctaaactcccaccttaagaacatagaaaaagaggccgggtgtggtggctcacacttgcaatcccagcactttgggaggccgaggtgggcagatcactagaggtcaggagtttgagaccagtctggccaacatggtgaaaccccatacctactaaaaatacaaaaattagccgagcatagtggcacatgtgtgtagtcccagctactggggaggttgagacaggagaatcatttgaatccaggaggtggaggttgcagtgagtcgagagtgaccactgcacttcagctggagcgacagagcaagaccctgtctaaaaaacaaacaaaacaaacagggaaggaagttataaagatgagagcagaaatcgatgaaattcaaaacagtaaaacaatagaggaaaatcagtacaaagaagaagctggctttttgaacagatgagtaagacaaacctcctgacaaatctgagcaaaactgatagagagatgacacaaattatcaaacagggaatatcactacagactttgcagatgtcaaaaaggtagtaagggaataccgtaaataactccacaaacttatctttgacaacttagatgaaatggaccacttccttgtaaaatacaaaccatcatattttactcactgtgaaatggataatttgaatgtcctataactgttaaagaaattgggtttttaagtttaaacctcctaaaaaataaatctccagatcaggaggtttttgttagagaattctaccagatttagaatgaagcattaacaccaagtccatatatcctcttccagaaaacaggagagaaataagaacttctcaattcattttataaagctagaattaccctgacagtgaaacaggacaaagccaggagaaaaaagaaaagaaaactgtagactaatattcttgatcaccattgactgtaacaaaatattaacaaatagaattcaacaatatataataataattttataccttgatcacatagggtttatttcggggatgttaacactggttcaatatttacaattaaatcaatgtaatctaccctaccaataggctgaagagaaaaatcattcaccgaatcttatcaatctatgtagaaacatacttgataaaattcaacacccattcatggcaaaaactgtcagaaaaacaggaataaagagaattgaatttgttaaagaacacctaccaaacacctacagctgacatgctgataccacaattaaaaatgcaatgtcatgtacaatgactcaaaaaatatacttaggtgaaattttaaccaaatacaacttatatgtgaaaaactgcaaaactttttaaaaatttaaggggagacatcattttcatggattggaaggctcatcatagtaaagacattgattctccccaaatggataaacagatttaatagaatttctgtaaaaatcccggtaagcttttttgtggatagagacaacactattctaaaatataaatgaaagtgccatgaaatttaaaaagcttaacaattttgtaaatgaagtataaagtgggagaaatgagtctgttcaaaaacaaaacttcttatatagctacagtaatccggtgtggcaatggcagatggatagacacatagatccattttaaaaagtgtatagaacccagaaatagacctacataagtatgtccaactgatttttgacaaaggtgaaaaggcaattcaatagaggaaagataacctttcaacatatggtactagagaaactgggaattcttgaccaaaattttacattttatacaaaaaaggctcaaaatggatcattaactttgatataaaacataaaactataaaacatttagtaaagaaaaaagaggcccgttacattggctcatgcctgtaatcccagcactttgggaggctgaggcaggtgagtcacccgaggtcaggagttcaagaccagcctggccaacatggtgaaaccccttctctactaaaaatacaaaaattagccaggcatggtggcttcagcctgtaatcctagttactcgggaggctgaggcaggagaatggcttgaacctggaggcagaggttgcagtgagccatgatcatgccactgtactccagcctgggcagcagagtgagactctgttttaaaaaaaaacaaaacaaaccaaagcaaagaaaacagaaaatctttgagatttaaagctaggcaaagagtttgttgttgttggtttttttttttttttttttttttggcaaagtttcactgttgttgcccaggctggagtgcaatgacaaaatctagactcactgcaacctctgcctcctagcttccagcgattctcctgcctcagcctcctgagtagctgggattacaggtacatgtcaccatgtccagctaatttttttgtatttttagtagagatgggcttctccatgttggtcaggctggtctggaacttctgacctcaggtgatccgcccgcctcggccccccaaagtgctgggcttataggcgtgagccaccatgcttggcctagagttcttagaattagcaccaaaagcacagttcataaagaaaagaaaatgataaattggacttcatcaaaaaaattttttaaatcttgctcggcaaaacaccctgctaagtggatgtaaagggaagcttcagacttagaggaaacttttgcaagccatgtatctgacaaaggaccaaaatctagaatatatgaggaactctcaaaactgaaccaaaaaaatcaagcagtgagcaaaggacatgaagagacattttactgaagaggatacacagatggcaagtaagcacatgaaaagatggtctacatcattaaccattaaggaaatgaaaattaaaactgcagtgtggtatcagtgcacacctatcagaagggctaaaactaaaacagtggcaaccccagtacttgcaaggttgttgagcattcggattacatacacatcgctggagaggatgtcaaatgatacattcccatagccactttgagatatagtggagcagtttctttaaatgtaaacacgcagttatcagataacctagtaattgccttcctgggcatttattccagagacatggaaacatgttcacacaaaacctgttcaccaatgtttgtagcagctttattcataatagatagaaactgggaacagcctacatatatttcactgggcgaatggctacagaaattgtggtatatccataccacaaaatacaacccagtaacaaaaaggagtggactgttgataaatgcatgcaacagcccaacagcctgaatgaatctccagaaaattatgccgcatgaaaaattccaatttatgtaaaattcttgagatgacaaaataatggaaatggagaacagattagtcattgccaggggttgagaggagacagggaggaggaaggaaatgggtgtggttatgaaagggcaacatgaaggatctttgtgcaaatggaaaagttctgtatcttgactgtattagcgctatcatcacgcaatcccctgatatcatactatggttttgaaatcacccttgtgggaggaactaggtaactacacaggatctctgtaacattattgcctacaaattcatatgaatctagaattatctcagaatgaaatatctaatttaaaagggacatttatgatgttaataaaactaagtgctattcagagaatgagcagaaggaggacagttgaactttcctacataggctgttctttttaagaagaagagttggtcattgatccattaatgatgagaaggaaccagttctgtctagtggaaaagcattctggacaacagagtgagacactgataccgtgtgctgtgaaaacttttagctgagatatgtcgctcttgtccggagagtgacatggaaatatccagtcttgcttctacagagagtcacattgtctggtcacacctatcccactgcaagacaatgtaagtgtgtgtacatacctacatctctgagattattttatctgcaagcttcagggcttgcaaagttagtatatagctgagcatggtggcgggcgcctgtagtcccagctactcgggaggctgaggcaggagaagggtgtgaacccaggaggtggagcttgcagtgagccgagatcatgccattgcacttcagcctgggcgacagagtgagactccatctcaaaaaaaaaaagaaaaagaaagaaaagaaaagttagcatctttcaatcagcaaacatttattgaacactcactgtaataacaactggtggtatttctgcagtgcttgactgctttcagaatgttttcacacacctgatctcattcgcatctcataactaccccgtggaatagtaattattaacacctttattttcatttcacatctgagggcactgagactgaaaaaatggtatgttgttgtgtttgaatgtgcttgatatggtagacatgggggagtcacatctgtacatatagtcctaaagtctatatttatttccattgtgtactgatgatagtactacattatttgatataataatggaagggacatacctatttttaaaaaacactactttggaggaattaacagtttactaaggatacataaatgccatagaaaatattagcaagaaatagaagaaagtgattattttgtctgccaattagtatgataaaggtaactgaccttgtgaaataaagaaggaacaatataataatatttaccaaatattttaaacaattttgtcatcaccatttaccaaataaccctaatacttccctccccagttgatacgtgatggcaagccagggtgagtttttgtatattgcattgccttaattcattgattgatgctggtactgcaggtgttggattattataagtttaagctattctttaattgtacagatagtaagtcttctctcattggaggggatggatatgaagggatttaacatttttttaaaatttaaaacatcatttctcattaaataaatacctttttcttttttcctgcagtgaagaaaaacatagataaacggatgactcaaagtggaagggaacaagtgattttgttacagtcgtcagaactgtggccagaatcattttagataaatatgtcaaatgtgtggaatgtcacggaagtggtcgttttttgtcctcccagcttggggcacatgctcatagaaatatgtgttagttattgagagtctttttttttgttaagacagtcccattctgttgcccaagctggagtgcagtggcacgatcttggctcactaccacctctgcctcctgggttcattcaagtggttctggtgccacagcctcccaagtagctgggattacaggagtgtgccaccatgcccagcgaatattttttgtattttttagtagaaatggggttttaccgtgttggccaggttggtctggaactgctgacttcaagtgatccttccaccttggcctccaaaagtgctgggattacaggcatgagcctccgcgcccggctgagagtcgttttttaatgttggattcatatttatcccacacattgactggttatgcagatactggtcgcattaagttcccaagaagttctcctctctgctgctattctttatcacagcatcctgtttatctgtttccccacgtgtattacagtctgtaattatttcttttctttgcttttttttttttattaactatgctccttccaggaatgaaatctccatgaagacaaggaccatgctcattttattttgtgctttatattcggtacttagatcagcgcttgccacaggacaagtggtcagtaaccatttgtgaaatgaatttgatttaaataaatgtacatttccagaagaaatgggaaatagacctacctggttaaatgagtgtttttatcttaaccggacatgggttatcactttgtaaactaaaaacaatcccatctcagtactgtaccagacacaattgccggaggttcagaaaataattaaagttttgtaatgacttataaattgcattattaaaaagtcaattttcagctgggcacagtggctcacacctgtaatcccagcactttgagtggccaaggcaggcagataacttcaccctaggagtttgagaccagcctgggcaacatggtgaaaccccatctctaccaaaaatacgaaacttagccaggtgtgatggtgtggttctgtagtcccacctactcaggaggctaaggtgggaggattgaatatgggaggctgaggcagcattgaaccgtgatcgcagcgctgcaccccagagagagtgacagaacaagagtctgtctcccaaaaaaaaaaaaaaaaaaaacctcaatttttatcaggacacagaggctcacaccttttatctcagcactttgagaggctaaggcagaaggatcgcttgagcccaggagttggagatcagcctgggcaatagagtgaggtcgaggctgcagtgagccgtgattgcaccacggcaacccagcctgggctacagagaaagaccttgtctcaaaaaaaaaaaaaaaaaaaaatgtccattttccaaatccgtgctgactccttggatcccgaccgctgtatataactgctggtttcccctacatttaatgtgcggtacagagaagaggggtggcaatgaagacgtgtgctagagacatacaagattctgattgcgattaggattactttagaaacttttgatctgctgggattgagtcatgattctgtaaagcccttgaagaaatacggttaccctcgtgtaagctgtctttcacagctcacttttacttggcccggagtttaattccaagtaatcattgggtaggtgatgaggttccgcttctccttgagctgaacgaattaaaatgtgaagttcccttactttgtaagtgggtaggagttcattggacataggccattagtcacttaatttttatgccatataaatggggcatctctttgccattttgcatgaagggactttgtggaaagccataaagaggggcagtaaatgtgcaggcaggtactttgtgaccacgttgcccctttcggctcagtccccttttgagggatgattcgttgcaggcaatttcctgccctagtggcagggagcaggcatgtgctttaaaatccttccttttaagaatgattccttgccctgcaaggttccttcaagttatttttttttttcgtctccaactgggggaaattgtaggactcaccaaaaaaaaaaaaaaaaaaaaaaaaaaaaaaaaaaatagaggcacaacacaagaagagtattacctaatcgcatgaagcataaatctgtgcgtcacctcctactttaataaattgctctttagtttcagaattggtgaatctaagtgggcacccaaagaagaaaaaaataacaattttccccttatctctgaatttctcttttgagctttttcgtagattatcgtgggtctctacaaagatttccttttccttctatttttaggttgttaaaaaaaagtcatactgtgtacttttttctcataatcctttatttgttatttaaagtataaataaatcatagatatttgcatacagcttagagcagagtaggtggggggttattttggtttatatcagagaaaatggaaataaaatagaaactcgatattgtttaaagacagcttaacagcattgtaaggttcataaaagcccaataagctattcttgatcttaaatcttaaatcgttggtgattttcatttagattttttttaatcaccaagaaggttgagatatgtctaacccgttatgtgagtttgaaacaaggtttgtgttctattttccattcctttggtctaaaattttattagacatttttcttagtgcaaaattaattgatcctggtggtgaggtggtgataaatcattgcaggtggggggaaattgatttttataccacctctcacttatttcaatcttagtggaattaactctgttaggttctgggggtgtttatgggtattataaaacatttacatcttgatgtattaaggtacttgagtggtttttagacattattaagggaattatgttaggattagtctggttatcaatttctgtatctggcacctagctaaggaaatggctgttttatcctcattagagccataaatagaattttattaactagcacgtaccaagtgccaaggctggtggtgaaaaccctttctgccttgaaggggagactgtagattcctgagcatgagacgttaaatgagtaagtctttgacaatctgtaaacagcttcctctgcagaagagtgccctgttgccttggagtttgaaaatactgcaggggataaagattccatggaaactttaaacaattgggactgatggatttaatccctctgatacgcttgtgtaagtctcactgaatacagatctgattatctattggccttggagaaggaacactgagactgtccatatggaagattattagggagaagagaaacataaacacactattaactattaaccatgctgtatatttgatctttactgaggctgttgatgtcagggcttggttttatttatctgaattttcttttgccatcaagattagttttaataggcttagacaaaacctggctgaaagattataaacaaaagataatgataaatggtaatgttcccacttggctgggatctggggagagaggaagggagattcataatagcttggtctaggtgaggattttttttttaatgatctggaagggaaagtaaattgcatgctaatgaaatttgcagacgatattaaattggaaggtgttgcaaataggagcgtggactggggacattacagaagcctatcctaagcaggttagaaatatgagcagaaaagattaaaacacgattcatcctagaaaagacagactaatacattttgggggtcgggaaagggggataccctgaatcttgcaatggaactgatgggaaaactcagaaggaaaaatagggaccagaggtagaggaagctacaggcagtctgcagggtggcattgtccaaagactctctgttggtccgtggcctgagtgggataagctgcatcgtcccagaatccaaggacagccgcctccctccgtcctcgcttctcacaacttctggggctgcctttctgctgtctctgtctttgttttcctctctcttcctttttttgttctttcatatctatcagctcacccacccctagtctgtagcatttatttctggtacctttagtaggagaaagatggagacagattggagacaagttggcaatgaagagtgaaaaagattaagggaaggggaggattgatacatgaggagggattaaaagcattgcatttgcatcatgcgtccacacagcatccagaggaggacataagcacacaggcacttagacaatgtaatgtcgcagtactcaggaaggtggccgtggcattatttagccccacgagccagaatatagccagaagtaattaagatagggaaattatataaccaaaattcattgcgggagagaatgagggttggaaacatcacggtttatgtgtttataccggtcattacataaaccagtcacatctgaagggctcacagctacactgaacaggggcttgcttaccaacagaaaatcccgaggacacatactacagagagtatgtggctatttccttttcctttgagattttttgttaatatatatgtctaggagcgtgctcagtctaacatctccaaagcagatctgcatgctagcaatgctagcaacatatgtgtgtgtgtgtgtatgtgtgtgtatatatatgtgtgtgtgtatatatgtatatatatatgtattacatatgtatgtatatgctatcaacatgcaggtctgctttggagatgttagactgagcaccctcctagacatctatgtccagtggaaagagcagtggagagcattgggctaacatgtattgagcagatggtgggggatgttagtaatgagatataaattgatactgtgcagccaactttcagaggtgcttactccatgcccggtgctaggacaagcaccttgcagatgtgatcccacggaattgtcaccataaccttcagagatgggcactgttattgatcccatttttcagaggaggaagatgcatctcagagagattatgcacaccgggaagtgttactctgcatagaagtaggggacagccaggattttccacaccaactccggagcccacgccttgtaataccacgttttgctggtgaatccctaattcagaaaattaccatgaatgtgtcatgggagaaaacagcttccaccgagggtgtgggccccaaagtgctttgttctggaattcattgcaggggagaggaagagacttcagggtaaaagaaacaggtgaggtgtggggacctttgcattattttgtgggagaacaccgagtaaaaaatagtggcggtggtgttggtagtaacggcaaaaacctcagttacttttgtgccgacgtaataacaacactattcataacattaacagttgaattttcagagcatttgctgagtgctgtggataatgttggtgctttctaagcatttttcacagactcctcttagaaagcctccaaggaaagtgaagattaggaggatgaagtaacttgcccaaaatcccgctgccactctgacttgatccaggttggaacccaggcaatttgacaaggctaccccactgcccgcctgagttgaatagagagaaaagtggaagaaaattaggccgtactgcacaccagagagacagaaacgggtgagcgtttgttattgggcaaaataaaaatgtaccactctatagagtggtatcatattaactgttcctgagtagagaaagaatattatctctgtaccatgagaagtaagagttctgaattaaaggtatcacctctaagttttaatttttgcagaagctctcttcatctgaattcacaagtattgactgtttcttgggaaaaatcccagattgcgcatagaccagcatgcttgatctctgagacagatggacatgctgtaatcttaaagtgaaaaatctaaggaaaattttacaaggtaatttttgtctccttttctgaacagcaagtttgacacctagctatggcttcagggccttctcattccttgtaccttgtctgttttttttttttttttttttttaattttactttaagttctgggatacgtgttcagagagagtgtgcaagtttgttacacagataaacatgtgccatggtggtttgctgcacctgtcaacctgtcatctaggtgttaagccctgcatgcattaggtatttgtcctaatgctctcccgcccattgcccaccacccccgacaggccccagtgtgtgatattcccctccctgtgtccgtgtgttcttattgttcaattcccacttatgagtgagaacatgtggtgtttcgttttctgttcctgtgttagtttgctgagaatgatggtttccagcttcatccatgtccctccaaaggacaggaactcattcctttttatactttgccccttcttttaagaggtctttaaacaatctcttagcttcctatcagcctgtaagtcttcagaaccaaggagagcaagctctgcacatcaacaaggtctaataatttcttgagcatttgttatttgccaactacttcattaagtactttgcatctattgtctcatttcattgatccttacaacctactcagttcatagttaagagaaccctcacttgaagagatgaagaactctgtgtaccattgtcaccctgttgcaaagtgactgagtctagatgtgctcctacatctgactctaaaacccttacgcaaccaaacatggtggcccctgcctgtaatcccagcccttggggaggccaaggcaggaggatcacttgagctcaggagtgggagactagtctgggtaacatagtgagactctgtctctacaaaaaagtgaaaaattagttgggcttggtgactgaggcctgtattcccagctacttgggaggctgaggtgggaggatcgcttgaaccccggaggttgagcctacagtgagctgtgatggcactctgtacccaacctggattacagagcaagacctcatctcaaaaaacaaaaacaaacaaataaaaattaaataatatccttaagcctagccattctttcctactacagtgaatgggctaaatttttatttattctgtttttatcccagtccttctcaagcagattctgccattgaagtggaaacattaacaatcagaggcctgttttcttggtgttatggcactggttgaacttcacgtagtatacataggtattacccagcctcaaaaacaagcaaaaattaaaaattctctccagaactcaggtgagtgaaaaatgggaaaggatgcctaactttatagatattgcaccagttcatccctttgtccctacgtgccgttagtatagtgacggagtttcacgttggcacccagagatccttccagaaggaatatgcacatacccgcagctacttttgtttttctttctttctttgcagtactctaattagaaattgtatatctgggaagtcctctgtggtttgacagtgagtggcagagatatggccaaattacctgcaatggcacttttaatttattttctactcctggcttgcctcacgctaaaccgactttgtttctgaagctgttcttatttggagggaacaagaaaaggaaggttttccaagtacaggagtgcaatgcagaaagttcctttttcgtgttgatcttagtgagctgtggatggtgctggaatggatggagagaaagggctttgcctgtgtagcttgtttttaacattattccataaagagcactgacaattaattagactcacacaacatctaggccattggtactgaagtggtagatggtaatcactttgccccatttttcctattatctacttagcagctacaaaatataattctgcttgcaatttatattctttttcatgctttggctttgctattggtactgaaattaaccagtttgctcgatctcttttcctatgccgtcaggacagctctggggtagttcagaaatcaattttcaatcagttcacacctgtacctaaaccaaatcccaatgatgcttgctggtaagctgccgatatttgaaagagtcactgtgctaatgaggccctcacatataatatctgcataaatggaagatgtcattcacaaccagtgttgaggacagcagcctgcagaactgcaggtgggtgggctgcgaagttgggataaatgtttcattcatttaatgccatttttatcacctgtttgcctgaggaagacgccatagcaacaatattttatagctttaaatacggtgttgatgttttctggagtcaggaaaagttgggtatacttacagaaagtggagaggtccttggtttctttcatgccactttgtaaagatgaacaactattcaatcacggtgcagaatacccctgaccttgtgaaatcaggggagaatggaaattattttcccttctcagtcattggtattcagctaggtggtttatgctaggttgtcttagaggtattgtgactccgttcacattatatacgagtgcatggagaacacattgttcttctcattaaaggcttattaactgcagtttgtgaaatggagtgaaaacaaatacgcttccaaatggctggcatgtttcttatcctcttgcctgacacagaaaaccccagggtatcggggaaattcacaggaacaagggcttcaaagaaacattcacagttagccagtcttaaaccgagagaggcaaggaaatcgcaggaatgttgatttcttcgttgttgtttcttttcagatacttactgtaggagtcaagaaaaatgaaaattaaaaataatggctaaaagtatggaagaatctgctcagtggccctggataggggagaaaagggggtcccgttaatttgcaaatttggaattccagatactaaatatgttaagcttagtaggaagtagattctgcataagcctccatgacaaaggcatttgattagaaatatgaaaagaacctcagaaaggaaagtttaagactatatctggaagtatgaattctgagggcgtgtgaactgaataaaaggagccatatacattgtggtagcaatgagtgcagtcttcatgctgacaggagtatttctaagtttatgggagccaaacaccctgaaatcccacatctctacatatggcaaaaggttttcatccctaaaacacctcttgggtgttgccgagtgctgattccatgcacaaggagagacgtggctgtttctttgcctcacagattctgagatgcataatagcttctgctttttgttctggtgagaggtttgctttttaggatgtaaatgaccatcacgttggcttgaatctgttccctgcttttcctgcctatccatccttgtatatcctgcaacctccatggctaaggacaatagggtctgttggtaacctcagaggagattggattgtaggtagactctgtttctctcctgtcctctttgtgactgctctagttgcagtggagacatcggatcccatccagaagcatcttatttacattgatggcccattaacacaacatgtaacccaagaaggaacgcaacaataaatcatcagtcacataattaaataaattgaggcttcttgtgtaaaagtgggataacacacagtcggcggagcgttatttagttcaagccaagctaatattgttagagcaaacattaaggcaggtgacgaggctgcatcaaaatattaattatacaccattttggcactgataataaatgttcacgtatggccctctttccaggagaaatgctgaaatatgtttcaaagcaacgctttgaataattcaataaattattggagtctcagtgggagagctcgactgacatgaaagtcatggcgtccatttttaaccccccatccctggtttcttctcttctccaaagggctctgaatgccaagtctccatgtgtcttaaatgtatcattaaagacacattcccagacagtgagaaatgcagtgtcgataacttgggaagagttcagaaatcttgactcagatgtgtgagaacttttaaaatcacagatcttggcatgaggccaagtctgtgtcctacagcctggctaccttggctgagttgctcaaagtctctgagcatccctctcctccttcatacattggaagtactagtacctaccttgcaagattgttgcaaggaatggaaatgagatatgtgctacccttagaatattaagtttggggagttctggaagatagcagtcgtctccttaataagtgtggttgttactaactatttttacagatctgacttctccatagccttgcctggactccgagcagaaggttactgtgtgttcttttgtttacccactggactggagaatgatccaacattgctctaaaacaggatactgcacaggctcacctgggtagcagattcattcagcctagccagtaggtctttatacaaggaagactagacttggaagaacttgataatcctaaataatattatttatttctattccttctctatctccctgcactagaatgcaacatctgtaagaacaaggattacatttttcccatacatggcaatatttgctcagcaactatatagtggtagagttgacttgaaggatatatttaaaggaatcaatcaagagtgaattagttggggttttaggtgagtctgaaactcaaatgcctacagagatctacagattttgagttgggctgggtataaaatgataagggaacagcatagttcatggcaaaccaaagaaggcacacctcacccaagggtattcagagtcatttgatcattaccaacgacaggcacaaaaaactccatttgaatgcaaattcagcctccaagaatgaactttgtgaacttactgttttcaagttgaagtgggttaggggaacacagtgactaatgactatttaaaatggccaacgagtgccaccaaaaatagtcatggtgttgccagctctatcttgtctatttgttcggacttgaagtgatcttcgttgttttcccagtaggaaacaaacttgctaagaatcctgtattatcattggtgtttgccaatatgatatttattaaattagccaatggatgtgttttgaggacatgtcatgtgtcaaagatgatgctaggtgttagggctgcaataccaaatactagattattcacaggttcatgaggctcatctagcatcattctcacaactgctaacacagggcagtgcctgattcatagttagactttagtaaacatttgatgaatgactaaatgtgtaatcagaacaggaaagtgaaaatcttgcagatcgccagctcagagtatgtatgcatatatacataaaagcacacacacatataagcatacatatatgtgatacatatgaaatggcatattaagaccattctccatttatcgtcatctgattgtctagaattaagaacatttacctatatgtggaggaactccaaaattattatgctattgtttctaatctagaaagatctttaggaaatactggtagaacttcacatcttcagataagcttttcagtctagcttacccatgctttcctgtcctaaaattttctaagttttgatatcttgctaaagaaaaaatgaacagtgttaagcgttggtgcattttgcgtacttcaaccttttctgtctataaacaagcatctgtaaggcacctggaactctgctaacatggctcacatgttccactttgtgacttgatgtaactcttagctgcgtgcagcatccaggtgagatgtgaagctctcattcagtttacaaacagtaaaattactgtgtcttaataatgtatctctatgttgttgaaatttatggagaaaatgtttgtggtcaacaatgcttatcagaatggtgtgaacggtttttttatagcgatgtttatcaagttatgttgtgcatatgagtcatgtagagttgatgcttgggaaatcttgttaaaagaattgcttaggagatcttgttcaaatatagattcagatttggaagttctgggttagagcctgagattctgcttttctgctgaactgcaagtgatgggatgctaccaagtcatggaccacactttgggtagcaaggattttaaacaaataaggtccatgcatcatacatactattgtacatacatgattttgtgacaaaccacatacatgtcctatgctagatactgcgtcatttttgttatctccagtttacaggctgaaaacctgaaactcagtcaggtgagagctgttgtctgagttgcacttctgggaaactgcaaaattgagatttaaacccaagaactctgacttcgagcacatgttgttaatgtccctgtatgttgcttactgtctctgctggtacagctgaagcaaggtcttaggtctctaagcagatagcacctgaatacgcctgtatgcctctgtgcttggctgcattgtagagtgtgtttttagtaatacctgcttggggtactactgaattgaatagggttggaattctggatctaaggtctagtggaaccaacagcgaattctggacattagttctcaaggcaatgcttctcattgagatgctgtcacccccaggagggtatagaccaacttctttagctccagtggtgtgagaagagtaagcagggattgagtgtgtctccagaatctgaacagaatgagcttttatcatttttaccaactatgcccttgatttgtgttcaagatagagaataacttttggagggggttatttctggaataaaaagggaatttacttatctgtttagtgatggggatgatctttcctccaaatcacaccgtggaacagtctttgatcagtagaatttttctttgcagatgtcacagaggtattcgttccttgacatttttggaagtgtggatataggatggaaaggtttggaagggtggaggtaggatggaagggtggatataggtgttattctttgcaccatcaatctacctgtgactggtgatgcaaagtataatgcccttccctcccaaaagtgtaccctttgcagaatcagtaggaagtgaggaagtaactccttttaacttggatgttagcagtcatcatcctaatcattccctattttaatcacagaaataaaaggaagaaaatcattcttgagtcggctaatgctatgttacagaaccatagctattcattggtaatagctggaagactgttctcttatgcccttttaattgagtgtctttccgtcctctagctgtccaatatctgtttaatccacaaacaagactaattttgactcaaaacatagctggccctagtacaagaagatgcattgagcaataggaattataaaatgaaaaggtaaggatggttgcatcctggggggaaaatgccttcccaggcaatttgagcaaacaaaataatgcaaatgtcttctgaatgtagtaaggagttaaggccatcagtaaaagagagcaaattgaatgaataatacaaagaatcatccctcagtaagagaataatgatttcatgaagcagtgtagaaagaggagggagagtagagaaatctgaatgcctttgatagttgagaatgaaatggaaatgtaacagcttcacaaggtgaatatggagaaggggtaggagaagaggaaacaagatcattagagataacccgtggttttaagcaaaatgaggggaagacatttagaaatttgtaaaattgtgaccacagcattttttgacagtggaggaggaggggtatgtagcttggatcgttgtatttagaaactaccttttttatgaattttgctgcattacctgaaagtgagcattagttacttgtataataagcaccaaaatagattgttgtgagcatagcagtgatgtccgtgtgaataacatgtgcactaagaacgaaggtgaatatggagaaggggtaagaaaagaggaaacaagatcattagaggtaacctgtggttttaaggaaaatgaggggaagacatttagaaatttgtaaaattgtgaccatagcatttttggacagtggaggaggaggggtatgtagcttggatcgttgtatttagaaactaccttttttatgaattttgctgcattacctgaaagtgagcatcagtcacttgtataataagcagcaacgtagattgtcatgaggcatagcagtgatgtccgtgtgaataacatgtggagggttagataattgtatgtggaaaagaaagggacatggacaacatagcggtcatcctattgtgtctaaagtgaatttagcacacatgggcgaaaaaggaaattttacgtatcaggtgttcagtgaatattggaggtgtttgttgtggtggtggtagtttttactattctgtaaaatgcacagtttcaaataaaggatattgttatttccactttaaaatacataagaaactaagtaagttcttcttgataccagaaaggggtccaaatccagacccctagagagtgttcttggatctcaggcaagaaagaattcagggtgagtctataaagtgaaagcaagtttattaagagagtagaggaataaaagaatggctactccatagagagagcatccccaagggctgctggttgcctatttttgtggttatttcttgatgatatgccaaacaaggggtgtattattcaggcctcccctttttagaccatatagggtaacttgctgatgttgccatggcatctgtaaactgtcatggcactgctgggagtacagcagtggtcactctgattgccatcttggttttggtgggttttggccaccttctccactgcaacctgttttatcagcaaggtcttcttgacctgtattttgtgccaacctcttatctcagcctgtgaattagaattccttaaccatctgggaatgcagcccagtaggtctcagcctcattttactccgctgctattcaagatggagttgctctgattcaaacacctctgacattcttgctgagagccgtgagttctcttgctggggttagatgatatgagatggtggaggccgcagggacggaattgtttcttttctagatctcttccttagtttactttctttcttccctttgtaaaaggaaaataaatcttgggacctcaaactcactaagccaaagggaaaagtcaagctgggaactggttcatgcaaacctgcctcctgtttttcttcctcggtgtaatggctacaaagatggaaagctacatacctccctcacctcttgcccgcctgaggcaaatgcatatccaatggcatcctttgccgtattgtctacattatcttatgtaaacatgcagattagctgagacagacaaaggcataaataattattttctcttatcctccaacatgaaaattgtatacttctcttgatcttgccctttcccctttaaatattgaaaccttgaaaatcatcttcttagaaaggtattagacctgtctcccaggcacatgttcttaactttggcaagtaaatctaagatgattgagacttgccttggtcattttccttgattaacatgtctttataatctttcaaaagttatagactctgtgttggaatgaatgtgtgtgtgtgtgtgtgtgtgtacatacttgtgtgtgtgtagtttgggtctgtgttgtacaggagtaaaaaaaatggctttatgtccactgtcagtgaatactgctgtgcctttgcactttgactttaaacaagagaaggtgtaattgataaagaaactagaagccaggcatggtggcatgcagctgaagtcctagctacttgggaggatgagttgggaggaccacttgagcccaagaggtcaaggctgcagtaagccatgatcacaccactgcactctagcctgggtaagaaagtgagatgccatctctaaaaataaaatagaaaaagaagctgaatttttccaataaagtcccacatccaactgtctggtggaactaccaccaatggcttctcattggtggaaacagttccacagattttttttttttttttaagaaaaacctaattgcatgtgaatttttctcagacaaaagtagttctaagagtttaccaagaaattaaagttcttcaataattcagtgtcaaatacatacgtttgaatactgaaagcagcctcttaatatccatcttcttattggctttttgtcttgctttgccttgtagatttttagataacgtctaaaggaaaacaacaaaatggttgagggggaacctcatggagtcaatttgtttttcactgtggaaaatttctgtagtcagactgatttttgctccttctaggcgaattgttatatttgcacacattgtcaaaaagtcattgaactatctattgctggtgactgcacacatccctgttaccagctctgtagtcctctgggtttgggtgtaaaaagagttgcctgaaataaatagttaactgaaactcagcctgggagctacatttctgagcacttccgttttctacttcttacaaaatacagttcaaaaaattctagactgacattcaaagtactttttcatctggctccagcctgtttcaaccttaagtacacacagtgatataccgtaggctaggacattgttgtccccagggtacttacaatttccttcctgtcttcatatctttcccccacctggaggaatgtctaccccctttagctccaagtcttatctactcctcatagccacactcagatagtagtgattaatattcatatatattcactatgtgctttacatatgcagaatctttcattttcatagtaccctattaagtgggtaatattgtcattttatagatgggggaaatgagaaccagagaggttaagtaatgtgtaccaaatcacagagctaagaaatattggatcaggggtataaacctagacactctggcttcaaagtctgcctccttaagtattataccagacagcctctcaatacttacatctgccatgcaactgttcttcatcttctccagcaaaatttaagctcgctttttccctcaaatattcctatcgctctgcccgggctcatcattttctgttttgaatatttgttattcattatgatgagatgaatgcatagcctgtctgccaggtccttggataagctcttgggatgcaaagtcaaaccattttctcccttcagggaactgataatctaggtttggagaggggcaagcaataaacatctgtgaggtagatgattatgtgataccttatgccgtatcttagtgtcttttaatagaggtgtgaatacaagatcatagaaacatagggaagaggggctagttcagccctcgtcgcctggtatgggcaggaagactctactgagaaaaggtacttgatctgaactttgaagcatgaatgtaattttcctaaccagagggtccaggaataggattccagtccaaggaagtgggatgaataaaacctcaaatacactctcttcatatgccaatgttcctggatgggtttacaccatctcagaattccagggtgagcgggggggtggtggaaatagacgaattgcaggaatttttactgtaagagtaaaggaaaaacatttcagtgaataaaataaagatgtaatgtttgccttatcctctaaatatttaaaccagagatcaaaaagtcaaatttcaactaggtgtggtggtatgaacctggagtcccagctactcaggaggctgagacaggaggattgcttgagcctaggagttccaggctgcagtgagctatgctggtgccactgcactccagcctgagcgacagagtgagaccctgtctctaaagaaaacaaaaatagattttctgcatggggccaaacaggaaaagggaaatgtctaaaggcaatagagatgggtggggcctggggagagcacagactcttcctgaaggaagcatcagcttgtaagcttattagacttggagacacaaaaatatggtcccagtatggttagatgagttggatttgtagatatttaatgttgattgttaagccctggtaactttgcgtaaattgttttaagcagtgagtggttcacatattttatatagatgggccacttagataatctcacttgcagtttgtggtctgtgatttagaccaaacaggcttagctcagagtttctgtgaaacaggtaacactaagtatgaaggtgcctgcttgtagaccaagtctaatccgtcagcaattcctgagtgcctacttgatgctgagccctctgtgagatcctatagagtctactaaagtaactggatgatgaagagggctcttaggttaatgcaagtttagaaaattgtgttttggcaattggcacataaataccaggttgtccttttgatatcactctgttaaaatgtataattctggaaatgttcctcttgttttgagtctctgatggagaaaataatgagtagcaacagaatgcatgtaaataggaggaatgtgctgtggtgctgcacatttacaccgttccctatcatttaaggagaccagctgataaaaaaagatacatgtttatttcgtttgttccttccctaaccccaatttgctgtgttattcttccggattttcaggaggaatcggcataggatagtaatcagcattgttttcaccgtgaccatgctttttccactatactctctttctcccactctctctcctccaagtccatttctggcaaagagctcttaagcagtgagtttttttttttttttttttttttttttgagacggggtatctctctgtcggagtctctctccatcgccaggctggagtgcagtggtgcgatctcagcttactgcaaactctgcctcctaggttcaagtgattgtcgtgcctcagcctcccaagtagctgggattacaggcatgcaccaccacacccagcaaattgttttgtatttttagtagaggcgaggtttcatcatgttggccaggatggtctcgatcccttgaccttgtgatctgtccaccttggcctcccaaagtgctgggattacaggcataagccaccgtgcctggccccttaagtgtgtctttatagtagaggtttgtatgctcagccttccagcctgtggagctgtgtgctattaccaagttttactctctgagtacatagcctgtagttgggtttgaatattaagtgtcaaattccaatacaccaatgagagatttgaagcaaccagcaggtagcttctacatccctaaaagctgcagagcgctgtctgtgtttatgagcggtctcatttcacacatgtccaatgactggaatgaagctggtgatccagtgtgtgatgctgaaggtaccattacctgcagctgtcctctttcctgaaatgaggaggggacaggggcaatggctcaggaggaaaacgtgcagagcccgctgttcacaaatgtgaaggttactccagagagcgccgggagcgatttgtcagctttgtttgcaaagagatagggagtgaaggattgtgatccttggcaccgataatgtcccctgggccacaaactaatccagcaggacacctgatgtaacacagctattttattcacatatgtctgtatggttatcatagagggcaggaatggaataacaaggcttaggagataatcatcaaacaacgtctccctcttctgtaaaggaagctgagcccaggatcttcatcctttcagccgtacaagcagttgttcttctcacagacatttatcgagcattttgctacatgccttgggcacggttggaaggtccctcacttcgcagagagacctcatccatggatttagtcactcacacgctcatccattccccagacactgcttatgaccttggtgccaagttcagtgctagattttcaaagaagaaaggggataaacatttggctccggaagcagaatcctggctttattactaaaaagctgggtgatcttttctctagcagcctcactatacttatctggaaaatgggtataaaggcagtttcacctcataggtggctgttacgattaagcggggaggggatgtacttttttttttttttcgaggtggagtctcgctctgtcgcccaggccggagtgcaatggcgggatctcggctcactgcaagctccgcctcccgggttcaggccattctcctgcctcagcctcccgtgtagctgggactacaggcgtccaccaccacacctggctaatcttttatatttttagtagagacgcggtttcaccgtgttagctgggatggtctcgatctcctgaccttgtgatccacctgcctcggcctcccaaagtgctgggattacagacgtgagccaccgtacccagcctgtgtattttaagaatacttagcatatggcatggcactgttagtgatcagatccacatgagtttacttgccagaggaagtccatgcatgtgttaccacaccgaggtaccggtacagaccccaagagagggttcttggatcttgtgcaagaaagaattcaggatgagtctgcagagtaaagtgaaagcctgtttattaggaaattaaaggaataaagaatggttactcgatggagaaagtagccccaagggctactggttgcccatttttatggttacttcttgatgatatgttaaacaaggggtgggttattcatgcctcccctttttagaccacagagggtaacttcctaatgttgccatggcatttataaactgtcatggtgctggtgggagtgtagcggtgaggaccaccagaagtcagtgttgtcgccatcttcgttttggtaggttttggccggctttcttactacaacctattttatcagcaagatctttatgacctgtatcttgtgccaacctcctatctcatcctctgacttagaatgccttaactgtctgggaatgcagcccagtaggtctcagcctcattttacccagcccatattcaagatggagttgctctggttcacacgcctctgacacatggatcacaatttggagagcacggataggctctcatggatctgctgtttcactgtggcttaaatcccagcctctacttactggtggccttagcattactgtgaccttgggcattttataaaatgcctgtgaatgcctctgaaccgagtttcctgatctgtaaaatgagaatagtggtgatttgtacagtagtcagggaaatactgggtagaagagggcagttccttggcaaaggcttcaccctcaagcctggatacttgtggccttaaatagcaacagacattcctgttgctttttggcccaccacacccccctatcctatacccatataaaccccaaacacccagttccagaaggagatgaagagacaaacagaagggcagaagaatggcagaatggcatggcagaaagaagagagggagcatctgaacgctgagaggagttcagctggggacagtcagagaggagattggccactgggtggcgaaacgccagaggaagatcatcttcccactccatcccctttccagctccccatctatccagatgagagccacctccaccgctcaataaaacacctgcattcactatccttcaattctgtgtgtgacccagttctttcggggtgctggagaagagctcaggatgcagaaagctgttgcactggtcctctgcatttgcaaataggcagagggtctgctgtgcttgttaacacttaagccatccgtggatggcaaggctaaaagagcacactgtaacacacgcccagttgggctcctgcagctgtctgtcatcatgctccacctcctgtaaggggtttgagcagtggcagcaattgaagagatgagccacacccctgtctcatgtcctgcgagggggtcagggaactctcttgtttcaatggtagtgtctgtgaatgcagttctactgcacagggtgctccatagacaccctggcttgtttttgctttccatcacactgatgtgttagtcatacctcacacagtcactcacagctccccaagtatatcccattgttatgcacttcatgtacacaatgcatccctaagacataaaaaacaatcatcaatttatttgacaaagtgtgctttgtttataagttttcacaataatcagagagtgactgctggtaagccttgatttcttttcaaattcagttgaacgcagctgtaaagtgcctgaactttgcctttagctaagcagatcctaatgggttcagttagcattgtatatgcatgtgattgaccaaaaccttccttctgggttggcaacagcgctcattaaaaagtgaaaatacccttagtgttaatttaccaagcagtgttcgagaatgacaagccatctcaagagactgttttccaaaggttagcttttgaaattaaacaaattatggtgagtttacatatttgttggatgcaagtgcaatctgatatttaaatggatcatgccaccctttggatgttcatggaaaatttggaattatagcctattttggttttttgatgatctgacattcctcatgtggtgcttgagaggttaagaacccagaggggagccttggtaggcactggtattcattggtgacagtggatggaaaagaatatcaggatcttgacccctttcctcgtgctatttctgcccttgtctctgatacttcatctctgttcccaggtaaaaggcatctgccaattgcaacccacagtcttgtttgcaaggaaagtaaccccaagcaatgcagcagctggtggtaacattagaatgaaaggggcaggctgaatactagcaccatgggaaagaaaatgcaagtgtccgatgcaggggccttagccccacaaactcatctgaaacagtggacccttttcctatttttgctcttccgtctcttcctcagaggatgataaataatgtgataaccatgttatttactgacatcattgttaaatggctaaagttgagcaggcagatctaattcttttaaattcatcaattcatgtaattctaaaaatagcgttttgagatgagtggcagtatcatgacttccatattacgggtgtaaagattgaagctcagagaggtcgagtaacttgcccaaggtcacagcgccagcacatggtgaagcgcacgtaagccaccagccagagtgatttcagagacctcattttactctaccttcccaagaccccagcgtcatcgtcactctcacatccaggtcactctctaccatttggccagtttttctcctaaaatatggtcagaacaagtcattccccttctcagagatccctaatggatccttaatgactacctgccaaagcctaaactcagttatttgcagtggccaaaagcgtggactctggcgtctgctgggtctcagttaaaggcgtggctgtccttatcactaagggatctttgggaaacaagtctgtcggggttcagtttcctcaatggtaaaaaaatggcattaaaaacaccaacctcagatggcttcactagaagcccacaccctcgttttaacacaatatacctctgtaacaaacctgcttgtgtgcccccagaacctacagttaaaataaatctaacaaaagcacctacctaactcacatgtacaatgggataccattcagcttcaaaagacaaggacattctgtcatttgtgacaacatggttgaacctggaggtcattatgttaagtaaaataagccaggcacaggggaacaaatactgcattatctcacttatatgaggaatctaaaaaagtcaaactcatagaaacagagagtagaatggtgtttaccagaggctggtgagaggggaggaaatggggagatgatcaaaggatacaacatttcaattagacagaagaaataaattcaagagacctatggtacaactatagttagtaacaatgtatatacttgaatatcactaaaagagtacgttttaagtgttctcaccacaaaaaagataagtatacacatgttaattagcttgatttagccattccacagtgtatacatatttcaaaacatcatgttgtacaccataaatatacacaatttttgtcaacttaaagaataaaaagaaatccctccgccaacccaactacctacctcacaaagttattagcgagacttgcacctgtggtacatataaagtatttagcggagtactcattaaattcgtactgttgttaggttggactcatgaagcctccttcatctagtttcatctttccaatttccctcaatatctttcccacattctggctccggaaaactattcctgattccctcatatggcatggggcttcgtgcatctagcttgtagccctactctttcattaagtgacagtgttttcaatccatgcattatcacagttgccacttttaccaagtccatttactccaccaccacctcccaagtcaggatacattgctcttcagtttttctgctgggaatcttgttttgctgtgccttctattagctattattaatgtgagcttgtttagaaaatggaatgccccatttatctctgaatccctaactgtacctggcatcatgctttgatggttttcacaaagtgggaactcagaaagtgccaaatggattaatgagtggatgtgcacattaaaatgaacacaagtaacttacattatgttcctttgaaaaacatttatttcctatgagttgtcattgaaaaaaaaatccttgaggatcagaaacagaacctggaaactttggaatgtagatttttttctttgcttctttaaattgtagacttatttaaatctctacatatttcaaatctaaaagaaattatgcacaaccagactctaaatccatgtggaataattcagtatttcatatacatgagttctgtatttttgatgggtgtcacatgccaaagaatgtagactatggctagaaattaagtgggcttttgtttgtttgtttgtttgtttttccaattgcctagataggattttgccttattaggattaaagactgctttcttattaagcgatgcaggtctcattgaaataagtacctttatgaaaatgatgcttttctgatttttgtgaaagattgaagcattttagggtaacttggaacattatgagatctagtttccggagatgtgagtaaaattaactccatgttgtgaagattttcaaatgaaaaaaatattacagaaaacgtttagggaaggctacccgtgtctgaggaggtgtgtgggaaatctctataattttctctttattttgctgtgaacccaaaactactcttaaaaaaaggaaaattttataaaaacagtttaggggagtgcctagaacttagcaaatgctctgtaacttaatgctcaataaatgctagaatatgcttctactagatctggacccaaaacatgaggctttacctattaaaagttaagaatatttatcagaattatatgcaagcatttcgtgaagcatcagatatgcagtatttcatttaatccttacggggatccggtagcacaggtagtccagccacttggcagaagaacatcctgaggttccaaggggtctgtaaatgccccaatatcaaactcagggaaaaatcagaaaccgagctttgtttactgcaggttttcagttcttaccactatatgttactgtccgtcatgacaagaccggagatgcaaatatttttatctcaaaacttcctacatgtcctgtggcttcatccacaatgtttatttcttacctgaaatcatgctatgaagaaagtattgcccaaaacacatttggatgaggtggcatattagatacataacttttgatggttacctgaggtggcccctgaacatttcgcaaacctttcatgatctcactccagttttatgactttcctttctcccacacggagatgctgagtgctgtattcatctttctgcctcgctatttttccttcatttccttcattgtctgcttttctggagcattgtaccaaatggcttggttgttctttgctgaacatgaaggactgactatcaggaattttcttttgtcttctggaattcactggctttttaaaaagtcagatatccccttcgactagatggattttatgttttgtttaatttttttcttcttgtgggtaggaatgtgtcatactgagaggcacgtagtatatctatcttggtattgacagcgttgaaccatatgtacacttttgaggtatctttgctcttaagcttgttgattttcctcttctgaggatgcatacgaaccaggtcatctgttgcaattaaaaagaaagaacatttttaaaacaagaaggtctaatctctttcttgtgcaaacaggagactgaggcccagagagagttaaataacctaatcaagaccaaatggctggtaattagcagacatgagactaaacttatgccccttttagtgattcatttagaaaaatatatttttaagacatttttcagaatactaagggagggtttttaggtataaagaatgtagtgaatgcatctttgaaaagtagcataaatgacttgaaaaaatgatattatcagtgaaggcacttcacatattttatgtgggggtgtctctcatacttggggcagaccccactgccattgattctgttgggatatgatgcttgaggttcttattcttaaagataactgcaccaagtttgccttgatcgttttactatttccttgagattactttcttgagatgatgagaccagcttgaattttcattgtagttgtgagacctttctcaggttgaaatgaattctgataagctgattatctctctgaagaaaatatgatgtccacatttcatagcttagttccgatcacttcagtgccattttcgttctgagacatcttcccgggtctgaattaaataagataataaggtgctctggagtccagtacgtattaaatagatttttttttttttaaaaaatcgaggcctacagagtggaggatggctttctttatggtgtattttctttctccatgttgaagtaggtagcagctagctagtttctttttctttatagagcaatgagttatgaagctcaaaaataaagtgttctcagtggtgtaaataaagcagtagtctgagtaaatatatcacactatgtactgagggtttgctttttgcgttattttgtctctttcttttccttctccgctctggtccagtttatgccattgtgtattgttgacacattaatcttggtaatagaaatggaaagctacttttcattgagaaatagattcaaaggaaaagatgattaatgggctgggcacagtggctcatgcctgtaatcccagcactttgggaggccgaggagggtggatcatgaggtcacgagtttgagaccggtctggctaacatggtgaaaccctgtcttttttttttttttttttttttttgagatggagtctcactgtgtcaccaatgctggagtgcaatggcgctatctcagctcactgcaacctccccctcctgggttcaagtgattctcttgcctcagcctcctgagtggctgggattacaggcacgcactaccatgcctggctaatttttgtatttttagtagaatcggggtttcaccatgttgatcaggctcgtcttgaactcctgacctcatgatctgcctgcctgggcctcccaaagtgctgggattacaggtgtgagccactgcgcccagcccaaaccccatcttcactaaaatacaaaaattacccaggcgtggtggcaggtgcctgtagtcccggctattcaggaggctgaggaaggaggatcacttgaacccaagaggcggagattgcagtgagccgagatcatgccattgcacttcagcctgggaaatacagtgagagtccatctcaaaaaaaagaaagataattaatgaacagaagttccatgcattcccaatgatgtgtttttttatcctggctctataaatctgtctgcattgcagcctcttgtgagctcccagattactgtatccctcctccgtctcacctccatggaactggtggatttagctccaaagctacctggtattgctaacggaggaggaggacacttagaatcttgaggactatcttccctacagagccgtatgcctgaggaggggagacgaatggctgggaatgatctactcagaggggagacgttacttagaattgctgtgttggtgaccagcatggtggtgcttgcctgtaatcccagcactttgggaggtggcagcaagcggatcacttgatgccaggagttcaagaccagcctggccaacatggtgaaaccctgtctctctaccaaaaatacaaaaactagccaggtgcggtggtgcacgcctgtggtgccagctactcaggaggctgaggccggagaagggaggtggaaattgcagtgagcccacatcatgccactgactatactccagactgggtgacacagtgagaccctgtctcaaaaaaaaaaaaaaaaaaaaggaattcctatatctgagagacgttgctttgtaaacctgttgcacaatttctctctccaatgacaacaatcaacagaactagtgagatgatggataataaccaaagtgaatctgttgggaaggggtgatgcatggtagaggagcttcctgtgtgtgtgtgagagctaatcacagccccatggcacgtctgagctcctttcttgtaaaagcacatcaatcagtgtctttctcgggttatcccaaatccttccacgggtagtcataagcatgtgatgtctacttgggatggaagcattctcattgagagcaaatatagcacaactgccattcagaccacagttcaagttgtggcttctcagtgagaacacgtaccaatactaaccctctctgaacatcatgcttaatctgtgaattggagataatgatgcccagggcatagggatgtcagtgcaatgctgcatgcaaattgtttatcagagtgcatgacacagagttaacatgagatgctcctcctcctccttctttttcctgttaatttttattattttcttgctattggcattgtctttatttacacatactcacatgcatatgtctttatcagtcccagatagatatttactgagttcatttaaatcgcaataatttccatcacttttacctgtgtctcaaggccctcttcagcttgggaggacttcaatatgactcaagtaggtacagctttttaaacacatactgtagtcatactcttagctttttttttttcctgtattacctcatttgatcatggggagaatactgtaaaagagtactttttatttccacctcgtgcattggataattgtggccagagatggacagtaactcacccaaggtcaagcaactagcaaatgctggagctgccagttgcaccaagtgggtatgacttccaagttcaaagctctttcttcacgtatgcacttgcctctgaatatcatggtctgtcctctaactgaccccttaggagctggacatgaggtaggtaggaagttgagcttcaagaaggagctgtcagtgcagggtggtccatgaaagcccctgggtctcagatggcagagaaacatgtggtttctttctagaattattcactccttcactgagcccatatttaaagcgcgttggttttgctctaggcactctgttgagtgcagagtatttggtggggtgcaaaaccctccatgtctgagtcctcaggcagcattcagcctggtgggagagacaggtactaatcaaatgcttatgttttcctgtatagttatagctgagataaatgcaatgacaagggaacctgtcctagatttgctgcagaaaccaatcaaaggaggctttgctagggaggcagtatttgagctgagagttgaatcatggatggaaaccacacaggggatctcctttcccttcaagccctgctgctggagccgggcaagttgcaggggaccctgagggctctcagttatcgctcatgcatcgaaaggaatggaactttctgcattagatttctgcagagattagcacttcttttacgtcagaggcatttttatgtaagaagtctactgatttcttcatggatgaaatcctttggccttcttaatagcacgtgtgtgccaggccagctccagaagctgatagattcaggtgaactcagttcatgtgaactcaggagcatttgctgagaagcctgattcctcttggtcagaagaactcactggccgtttctacttagatgggaaggagcattttcatctcccaaacaattttgtgcaatgcctgtaatcagccagcagttgccgtccatttctgcctgtcttttatcattgaacctaaaagaatctgtctgcaggaattaaaagttgtcgttttctctgatatactatgccttgcactcagtacctctaaggaaatgtcacagaccccccaaaactcccccatttaagtggtggaaacatggaattctctagtttcatgatgggattggtaaaggaagatatagctactttgtgaacttggtgcttataccttctctccttttgctagacatgaacctgaaggcaccacccaaaaagtcaaactagacaacatctctatttttaaaaaaggagaggcagactaaacattacatcagcgtaaggacttcagagtcacacagaactggatttgcattctggctttgctgttgactagtggtaaaacctgcagcaagttctttcagattcgtaaacgcccccctaggtcatcctcaaaagagaaataatggtggttgtgcttagagagacttctgcaagtaaagtgcctagtacatggtaaatacttggtgttggatagtaatcattattgccgggcaggaggctgaggcaggagaatggtgtgaacccgggaggcggagcttgcagtgagccaagatcgcgcactgcactctagcctgggtgacagagagagactcatcttaaaaataaaaaaaacatcatcattatagctattaatattgtccaatactaaatggataagaaataaattatttcttatttatactaaattatttctttctaagtctaattgatctaaatacatatgtaaataatagtcattatataatatcatttaatatattaagtcattatataatatcatttaataatatataatagagaaaatgatataacaatctgatacataatgagttttaattatatatttttataaatgatatttatgatttatatctttagattattaatatttatgtatttttataaatgataatcatttatgttatttatatatttctctattttgataattatttccatattttatacatgatgattgtttatattatttatatgtttatttagattgttatttacatatttgtatcagtgataattatgttatttatatgtttatttggattattacttttatatttctataaatgataatttatattatttatatatttatttggattatttacatatttttataaattataatcatatattcatttaggttgttatttacatattataaactgtaatcatttatatattcgcttaggttgttatttacatatttttataaatgatatttatgttatttatataagtttctttggattgttatttacatattttataatcatttattcatttatttatttaggttattatttacatacttttataaatgataatttctattatttactgagttatttggaatgtcatttacatacttttataaattataataatttacattgtgtatttatctatttggatggttattatttgcacatcctataaatgatcatcatctgttatttccatatttatttatttggattgtgattattatttgcttattccttatgtagatccttgtggccctgtgtgtgaatccatgttcttgagcttgcaagccatgtgttggatcatctgttttgcttcgcctttgtggcatgaaagcaatcttagataacacttacataaatgaatgcacatgactgcatctgagagaaacttttttacataaaaatactggctgtgtgttgacttgactggtggaccctagtttgctgagtgacagggttgcctgcacttgaacatcctgctcgtgtggctctgagtagttcttacctggatgacttagtcaccaaaatgtatgttgtaagtaaaagaagccccttggagctaggctgagccagagaggcagttttttggggaaatgcattggtgtcacgtttggtatgcattggatgcagaaattgcatccctgatttatgcgaaaagcaggctattcgaccaggtatcaggagttgtggaataagagatgcaaatgctgtctggaacagcaggtgccattcttagaaaaatagatatgggggatgtagaggaacaccaaaagtatttcccaactatcactcctaaaacaactttgctcagtagctgtctccccctgccactttttaaactctacagcacattttaagtgccttgtccgagcctggccagagggacgtctctctgcttctacaagaataccttgatgatatttcccagctgaaaagacttacctctctcctctcaccctatacccaggaagttttaattttatggagattgaaataatcaggtctcatgtgtatatttcctttcaaaccactgcgttcgcctgttttgaattcaatggcctgtcttatgtactcggtggagaaataatataaacaaaccttgaaatttccctggagttcagcttcccttttcatactgggtctagctaaagtttggagccaactaaaaagagcctcattgccttacacacaccctgttatctctggcgggttcaaatgcaatttctctgagaaggctgtggtacctctgctctctctggccttgaatctgagcgtctaaggatttctttggagtacacacagttgcatccttctgacagacagtgcaaattaaaagatccggcgcggcccaggaaccagggacccaaacttgccccttgggttttcatttacagttaggcactgcagacacaattattgctgacagggaagcggagctggtggcagagtgcgcctgacaggaggctcatgccagcccataattgggaggattatttttaatcagaacataccctacagcccaaacattagaaatctcctgtaaggccaagacaggaaattaaacacaccaacaataaggctcaaagggaggcggtgtgtggggtgtaatattgttagtctctcggaggtccctagagcttcggggagaagtttgcttccctacagagggaggctgggaggaacagaagcagacacagagactatacctgagcccttgttgaatgggcaaatgcagccaaattaaatgcagcagaaacactaattgcatttaagtgcaatgtgtaatgcgtttgtttcttgcaaatgcaatgacgcttattgactttagtagtagtagtagcattttgagacagagtctcgctgtgtcgcccaggctggagtgcagtggcacgatctcagctcactgcaacctctgttcaagtgattctcctgcctcagcctcccgaggagctgggaatataggtgcctgccaccacgcccagctaatttttgtatttttagtagggatggggtttcaccatattggtcaggctggtctcgaacttctgacctcgtgatccgcccacctcggcctacgaaagtgctgggattacaggcgtgagccaccacacccagccgcttattgcctttaagcagcataagccacatgtaaaccttggaatagcggatacaattgtatttcatcagtaagagaagagcctcactggttccttatttttaggaatcttcagtgagcacttactacgtggcaggtgctgtgatggcttatgatactaggctatgctgaaagtcatctggatgatcttattgccttggcaaaattttgcacagcacagtaaaactttgtttattaaaaggattgttgttgaagaagtaggcgtagcgcttggctgtttggctccagtaatatttatttagtagtagtgccaggtaatttagctgtagtgtcctcacatcaaccctctgaggtgggcattattatacccattctatggacaaaaaaactgaagctccaagcggtcaagcagcttgcccagaactaataagataactgactttgaaaccaaatctgtgtccaaaacctgtaggatgtcaaactatttgtcaaactgtactgtcactcatgaatatgactgggcacagcctggtgcttcgaggtgctgccactccaatagaaaagacagatgtagagacagatgtctacaaatgaagagtctatagagatgctaactggattctaagagtggggaacatggcatgattcactgtgcttggggagtcagccaggactccctgaagctatgaagaacaggtgcaaatttaccagtggtttaaaaaaaaaaaaaaaaaaagaacagaatcccagacataggaaacaagtagtgcacaggcacagtgttatcagagatgctaggacatttcaatttagtttagaactattggcttgcctggatgtggtggctcacacttttaatcccagcactttgggaggccaaggcgggcaaatcacaaggtcaggagttcaagaccagcctggccgacatggtgaaaccctgtctctactaaaaatacaaaaaattagctggacgttgtggtgggcacctgtaatcccagctactcaggtggctgaggcagaagaatctcttgaacacaggaggcagaggttgcagtgagctgagatcgtgccaccgtactccagcctgggtgacagtacgagactctgtctcaaaaaaaaaaaaaaaaaaaaagaataaaagaactattggcttttgggttttgttcttgttaggctcactcaacaaatataaagggagaaaatgaatctctctttggggaacgctcatcacagagaccaagcatctgatgtggggatgggatgggaagcaaaaggagatgatgttggagaatccgctcctgaagtcaaaggatattccatgctgtcctcactgtgtgaaatgcctacgcctgatggcagggaaaggtggtgctttaacccatgactgtccttagaaaagcaaccacaggtttacagtaacattacgtattgcttctgaggctggagttcagggtgcagagatcttcagtgagtccaggaaggcatgaatctttcgcatggcagactgaggcccatcagatactctgactgcagtagtggttactgctaagcagcttcctgttatgtggctgggagtcactggattcccatggggagggcttctatctccaatctaaggtggcttcagtgcacttcctgtctagttcacttctcccatcccaggtgtgatgggcactaacctctctaccaccaggaatcgcacatcataatccctgagtggtatcaagcaaccctgggcagcttgctgatttggcttcagggtcctttcaaggacagttaaacgccagacacctgaatgaggtcaggggctgctgtgaggcttggagagcatgtatgcaatcataatccctgatgtgatcaagatacagtttgcttccctgcctgcagggtgggtacaaaatcccaacttaggtgaggcaccaccctctgagatggtcttatacataattgcattgtttgctagcaacagaaatccattcaaactcactcaataaatgggcatgtttcttacacagcacaggagcacagaagtgagtttcagcactaaaagtcaggaggtgttctaggtcccaggaagaaccagcatttctgaaccgctgtgtaatcaggaaacaaggcagcccttaccctcccgccccaaaaccctcctccatggctcttccactctcttcttcttctctctctcattgctacttctgctgttttctgcacacgtggcagagaagagtgaccccacagttactgacgacacttaagtgtgccttgcaaattcctaggagaaaattgaacctagatagggtgaggtttcgtctgttctgaacatagcacttactaatggagccaggatcaggcgctgcagacccaatttctggcactatgctagacagagatggggaagggaaatgacttttggggaggctgagtgtgtctaaaattagccataggatgactaagccgatagttccttctttccttccttccttccttccttccttccttccttccttccttccttccttccttccttcctccattccttccttccttccttacttctttccttccccctccctccgtccctccctgtttccctaccttccatcttttcttccttgggtaaatatttactgaatgtctgccatatccatagcattgtgatcagagttaaaatagtgagcaaaacccacacagctcctgccctcatggagctaactaacatgctggtgagacaggcaaactttcatcaaataatttttctaataatttttaattggatgcaaaatgcaaactgggatatgggctatgaagaaagggtgatgggctcttaaagccatgtggtcagggggttccaacaggaagcagcaatgcactggagttaattaggtgctaaaagcatccccagtcaaagccatagcatgccaggcatccctgtggcaggtgaggagtaaagtgtggtccagaatgggaaagtccatggtgctggtacccgggactggggggaagtgtgatctccttactaacaaataaataaggctggagctgtgtctaggagcaaatcattagggatgtcaggagtaaggtaggtttggaatgaaatgggaagccagcaatgtaggatttaaacaatcaagtaacacagtcacatttacattttgtaagggtcacactccttgacctgcatgggggcaaggggtgcaagcctggaggcaggaggagatggcattgcattcattgcctggggaagtctatgaagcagttcatggcagaatctatggaaacagaaacgttgcagtagccagccctgtttagagagtcagagttagaaaaaaactacattctggctgtccaagggtcatcaacaccagtgttttggaagtaatcggtttgctattttgtgcatccatttggatggagtgcataggtgaaggtagctaatgcatgaactgagcattcaccttcattctgcctgactttgttccaatgtcctccgagtttccttcacttgcagctctttagcttctgtgtaatcttggtacaatgaaaattgtgcccaattccactgggacctgagattctccctggtcacaaattgctcttcacgtagtttgcaagagtaattgcaaactcagaacattttagttaaaaaaaaaataacactaaatcactcttctggaactctagagagcatattagggttttcttgctgtctggtaccattgttaatgatcatttctgttctcgctttataacaatggttctcagcctctgtttttataaaataatccccctaaatgactttacaggttcttattagtggaaaggaggggctataaaattcatttcaactgtaggttggattaagaccagatgtaaaggtgtgggtttggactcagatggacatgaaattcaatgttattacctgggtaccaagtacggtagcaccaaagaaggcccagttgctcagagaaacctctttctggaatgaaggtcaatgtcctttcttggtgctgtaaccctctggggcaaggaagaatcacttgttaggctacccaatgtagtgagcagtacataaggggccgtttcccagactacatagttacagtgttgaattaaacattgcccttgccttccagaaattcacagcctgggtaggccaagtccacaaaaagttagaaaggatgtatattctgcttctgatagaagaatatgccaatggccatagggacctcccctaaaattcaggcccactggaagggtcaatgaaagttacagagagcacgcttgggtagatgttcaagtctcaagactccagaccttccatgagttcaaatggggccaggtgaagggcagtttaggatgagagaaggttgtaatcgaagggctaaaggaatactagtgcactgtgtcttaagtatttgatttagctggatcttagaatgtaaggatatgttcggagatggaggaagtgacaggaaagagggggtaggagctgaaaaggttgaacctgaccatggtagctattatttttaataaatgagaggatgcatgcaaattttgatatgaagtttgggctgtactagggattcagtgaaactacaactactataattattaggactcagataatcctgcattggaggcatactgtgaatctctagaagagaaccatgtattttgactatttctattctaattattctaactattcttcccaaatcatgttcttccacttctcacctttacgatgtcagctccgttgccacttccttgatggagccttccccactgtccccggtgaagatctgtctatcttccccactggactgtaggcaccaaggggacagttcctgacatttagaaggcttaataaacaataaacttttaaaaagcaccgactttgtgctaagcacaatgctacttgttttacaaatattaacttttaatattcacctgaattccttgaggcaggtactgtttattcccattttaatgatgaagaaactcagacaaagaaaggttgagtgacttggccatggtcacaaagttagaaggtagtgaagccaaggatgactggaaagatggatggatgggtaggtgggtggatggatgggtagttaaatgggggacagatggatagatagatgggtggatgggtggacggatggatgaatgggtgggtggatggatggatggatggatgggtggatggatcgatgggtctatgggtggataggtgagggatgggtgggtagatggatggatgggtgaatcggtggatgggtggatgggtgggtggatgggtaggtagataggtggatggatggatgggtggatgggtgggtgagtacatggatggatggatggatggatggatggatggatggatggatggatagatggatggatggatagatggatggatgaatgagtgcatcattgctgtttgttgacactagcccatgagattggtcatttttattagttgaaagaaattgaaaacatcaaaatgcaaagcaaaaggctattgaagggtgaatactatcaccaccatttcaaccactgaatagctctatctattcttgggtctctctgcaggtcacccctctttccaatattttgaagtcacttgatgtttttaggtgttgtaatttatcaacaagaggggactcaccagatgtgaagactacacacacatatatatatccacatacatacacatatgtcatcttcatttatatgtatatctgtatatctatatatctagatatacctatcacattaggaaagggggtatattgtctaaacatatctgcaaataatgtttaaaatttacctctaaatcttgtgaactttgttgagtcttggcgtaaattgtactgctgctttataagagtaattcaattatcgatggatcaggattccagaaccctgcaaagtagtcccgtctctgctacttaagtttctccccagagaggaaacaagtcagtatcccaacccccttgggtataggatgccgtaaacatctttcagatctaccagaactcttgatttttctggtaggagatgacctctctttcaactcactgaactataggagattataatagccatttgcagtttaggtgatatttggtttatttaaatatcaatgaacatgaatctcactccctgtgattgggtgatgatagccatatttatgaaatttattactgctaggataccttgtatcataattctactcattgcaaaattaaatcatttccatatttgaactttaagtaagtatcacctgaatgcacattgtagaatcctgcagttctagcgttgaaaggaaatttagaatttatttcatccaagctaattcctagggggaaaatccataatgatatatctgaaatgtcaacctccagtcttaccttgaacacctcctgtgacaagaactcatggtgtaagagaagaatacagaagagtacttccaagcttggtgttgacttgcccgagttcaaattcaggcttcacgatgtacatgcatgtcttgtcaactgtgggagctgtctgggcctcagtttcctcttctgaaatagagaagataataacaccttctttgccaggatctgagaggatgtaataaaaatacatcgaagaactgaatcattttcatcatcatcatcaccatcattgctgttaaattcacaatatagtcagaacctattttgaaggttggtccatattactatgacaaaaaaagtgcggacaaaattcaagaatacatttcttgatactaaagtcattcccctttttcttctttaggaaactggtcaaagaactcatgcaagtggaacttacagcttccttgatcggactcagcattcagtaagtgcaacccattttgaacattcattccataaatacatccatgtctttgatcctgttctctctgaaaagctcttttctgcaggtttgaagttgttacaaaaactttgctgcctgcctatgtctttctcttctgccctattgtatcagagatgagaagagggcctgcaaggtagaaccaccctcctttagccctccctccccaatgaacctgggaaatttgtgaggttatcaatgagttaactgcgcctttattagctggggattaaaataaaatgtgtttttggtttctttttttctccccctaaggttttcttatcaggagacattctgtcccccttctgagtcacatgaccctgcaaagtagaaagaaatgccagcaaacacagatcagttaccgagagcatgtatttcttgaggcatttaagaacagttcatttgctctttttgagctggaatacatgactatgatctgaaaattactgcaaaaaaaaaagaaattttttactttaagatgctggggtacattatagaaatttcatttgttttcagcaagtaagcatttttccactttctgcctttctcattgcatgcaaggactttatttttggtgaaggtagcagtattttgtccaattttctcagctctctttttttatatgcagatatactctagcatttggggtagcaccttcacaaagtctctgatgtcagccctcctctgcaatagttttatgggtgaacagcttgttttaagaagaaatctgtaataatttaattataaatatcaaaattttaaaaggctagctgaaagaaatatttatttttcaagatgtagcttccttcataggaatgcagaatttcttagcaggttctacttctgaaagtgctggagtataatttgatacatcaaatatcagcccatgtcataaaggagcaggtagaattggaggacatgggactccaggcctgcaagaggctgatcaaagggaattcttttgccctcagtgggattgcaggactctttctattgtcttggaatttgcatattcaaatgcagaggggaaggaggcagagatagaaagaactaaaaagatggtgtattagctgttagctacatcagaatgacttagcgtaaccctgatcagctaacgcttgtatctcacaggagattagactggcagcttttgttcctaataataaaggaaattccatgtctaattccctacgtgccacatctatcttttcatgcctttgaagttcaggcttcggcatttcttgaaaactgggaggttttgtaagtaaaaaggtgggggctgtttggcatgaagtctgttcaaatctatttagtgtaaagttaaatttgcttgttacttgatctttttctgtttaaagcagcatctttctcatagatgcctttgttggtgcttgggcagggaggggagggatggaggacataaggtttcaaggatgggttttcagatcatacatgaccttctcattcctctgtcttctgaatatgattgaaattgctgcttctctgaaagaaattcctgttccaaccctgcactgggattgaaacttttaacctaagggaggctgtggtccctaagataattagtacatggatgtaagggagctcatgttaatttgtctatggatatggtatttctgtatctacaactgccatctaaagagagacattaaaaaaagtattaatttactgctctaaaccagtgagcagatataattttttttaaagaaatcattttagaaaggaagcaatggcaagatgccttattggggatgtttatgggtattgatccctcttagtgtatctagtaggtttccatcctgtccttgggattgcagcttctctgatacagcaaacctcaatccccttcagagaccaagcagtcacttcctctggaacaaacattgaattctgggacgtcgcctggttatcaggaaggcagatgatttgacatctaagctggccacatgcctgggttttgtgtgttcttcacccataacatgttggatgcatgctggttgagaaattgctccagtctcttacaggattttagcaggagcgatgacctagtagttggaatttgtacatggctgacactgggcctgggctgatgttgtgaagaatgccatattttagtctgaatccaggttttgatatgtccattggcttcagaaaattaattttcatttcctgcttccaaaatttggttattcttgtttaattttttccagaatgtttcctttgcatcggtaccctttggattgctgtttgttcaatagtatattacccctcatgatatccacagcatttactgtcgtgttggtagaccatgagtacttgttggatataatgatggtcgaacaggtacaacaatggaaagctgaataggtagatgaatgcttcttaactcctgatggagtattgtgtaaattggagaaagatggcattgacattagacaagagaccagtatgggtgtttctgatggttggtttctattccccaatactcttcttcaaagctttcacttctactttgacaggtctagagtaacagattggccaatgcacatggtgtaagagaatgagctcccaggaaccagcatctgttttctagctctccacatccctttgttgttatctgtgtgctaagaggaaagccacagaaagctcacagtagcagggtcggtgttggaacttaagcctcagcatgattttctacaacttgaaaatttaacttccaagaggtttccttgatctctattttcctatcaggctaaaaatcccatggcatgctgcatcatgtttataattaattaattgtgcaaactttatttttatgtttgtctttttctttggtctagtgctatccaatacaccatgtctgtgattataggaatatttttttttcaccaagtcttaatgaggtattattgaccaataagaattgcgtcaatttcaaaagcatactcttaatataattggctttggtgactgagagggggaaggttgggaggaggttgagggtacagataagaagaaggtggagacagaaagaactaaaaagatggtgtattagctgttagttatatcggaatgacttagcgtaaccctaatcagctgatgcttgtatcacacaggagattagactcgcagcttttgtccctaataataaaggaaattccatctctaattccctacatgccacatctatcttttcctgtccttgaagctcaggcttcagcatttcctgaaaagtgggaggttttgtaagtattgggtagagagggcactgcttgggtgatgggttgtttgggtgatgagtgtgccaaaacctcaaaaatcgccactaaagaactcatccatgtaaccaaaaaccacctgtacccctaaaagtattgaaataaaaataaaatttaatttttttttaaattgcgaagatttaaggtatatatgagacatgttaatgtacatataccttgtgaaatgattaccacaatcaagctacttaacatacttatcaccttacatagttaaccctgctaagagaatagataaggaatattctttatctgtgctgttcaatatggttaccagcagccagacggagcaagtgaacgcttgaaatgtgactattacacctgaaaactaactgaaaactaagtgttctttcaaaaactgttattaaaaaaaaatttgttactttattattattattatttatgagacagaatctcactctgttgcccaggctggagtgcagtggcacgatctcagctcactacagccttcacctcctgggttcaagcgattatcctgcctcagcctcccaagtagctgagattacaggcacccaccaccatgcccagctaatttttgtatttttagtagaaatggggttttgccatgttggccaggctagtctcgaactcctgacctcaggtgatcctcctacgtcggcctcccaaagcgttgggattacaggcatgagccatcacgttaaagtaacataaatgtgttactttagttttaattgacaaacaataattgcacatattcatggggtacatagtgatgtttctatacatatactgtatagtaatcaggtcagggtagttaacatatctatcatctcatttctttgtgtccggagagttcattaatttaaatttaagaacatgtggcttgtaacctgatactgtattgttgtatgggatggctttagactagcagccttataaatacaggggctaggtcagaagtgtccgtccttgtacctaggctgatacttagctgttatagatcaattaggactctgactgataaattgctactgtctcaagccccaaagtgtcctctattccctgctgttccatatgttctgcttccttgaatttacccttgatccagaactaaaggtttaatggtcccctgggactctgcacaatgccacagcattcatctattctaactggttggtgcctaatgcatgctgattattcaaatagtatatcacctctgattatttccatggcatctactgtagtgctggcccatagttcaccatcagtacttgttggatataataatggtcgggcagatagagggatggaagaatgaagagatagataaatgcatccaccttttgatggggtattgtgtaagtgagagaaatataacatcaacattagatgaaatactggtatgggtctttctgatggctggtttttatttcctcagtattcgtcttcaaagctttcacttctacgttggtaggtttagaataatagactccagatctatcactgaattctaatgccatatgcagcacagattgctatacatcttcactcatttctttctgtcacttaaggctcccaatgcataacacttgaaatcagtccacgtctcactcattgacccatgggcaccactctcttctcaggaacctcagtcccaagccttagttactaacattgtctttgtttttcatccgccaccaaatgataagtgagtgttttatctgtatcttctaagagacttcttttcattccctctgttggcatattgctccagggacttcttacttacgtatctgggaattctttctaggtagtcttcatacctaaagccaccttcccttggatcccagccaacagattgcaggactaatattcttgaaacaagaatatcgtctagttggttgttgaataagctcatccttacctaacattttatcttttctccatgaatccctcaatacatttcattccaactgggcaagttcatctcttgatatctaaacatgtttatttcccagctccaagcacttgctacacttggtctcaccagttgggatagcctttcctattcttttagtctacacttctatgtagatctctgttaagccctcctgataatgaatttttctctgtttatttcagctacttgattgccccttgtaggataaagaaaatcctaagccaattttcaacgtaggaagttgaccctatgattatattttagaacctgggtttcagtggaacaggcaggagtggaacagagtaaggaggtattgaaagagaaacaacaataattgccttccagggagacacagttctctcacatgcaaaattcagcagatgggttggaagtggaagaggttaaaaggcgccagttggaatacaagagggagagagaatgagaacaggcatggcctagggcattaccttaattcaaggccaggcacagggtgggtttcatgccagctgcatttagagtctgtggtctggaaggacaaactcatctagataatgctcattgaccatcccatttgctttgacacttccctggccaccaaccacccccacacactgttgtttacatttcccctatgaatatctcttacctctcctaagctgctgcatagcagagctcttttcccagcttccctctgcatataaggggcaggaactctgcagacctttttcgatcgaatgagtacatgagcatgggaggaaagagagagagaaagagaaggcagagagagaaaagacagagagctaaaagaagaaataacaattccttctgcttctttattgttaggacagagcaggataataaagaatggaagttacaaggaaggtgtgtaaagtagtagcatgggtaaggaagagggaagcccaggcagcaccccactgtcagcctcgttcttcttcatcatcttacccagttaaaatctgccatggtgcttatgatgctccctgatgaccagttttactgggtgtgcacaatctgtcttccccactggactggaggagttctgagggcatggggtgtgtcagtcttgcttgcttctgtatccttagcacctgtaaaagtgacaagcaggtacatattttgaatgagttgttcattgagttgaatgaatttgtgctgtgaatgttgatcacactctttgtactttcaaattattcttctgtcatccatgactgccggtggcaacccccatacccccaatctagatcagtctttgaaagattaagggagcaatgcttgtgaattgaccacacagctgtcttttgaaaacattatttatatgtttattaatttttcaatttgcataaatttagaggttgcaagtacagtttccatacatcatgggtatgttgcatagtagtgaagtctgtgcttttttttttttgagatagagtctcactctttcacccaggtgggagtacagtggtgtgatatctgctcactgcaacctacatctccaagattcaagctattcttgtgcctcagcctctcaagtagctggtattataggtgtgtgccatcatgctcagctagtgtttgtatttttagtagagaaagggttttgccatgttggccagcctggtctcaaactcctgacctcaagtggtctgcccgcctcagcctcccaaagtgctgagattatagggatgagccaccatactcagccaactctgagcttttagcgtaaccatcaccttaatagtattcattaagtaatttctcatccctcaccttcctcccgccctcccacccttctgagtctccatagttcatgctctgtgttcacaggtacacttcatttagctcccatttacaagaactacataactcttaacaacacatttgaccaatctggcttcagtttcctgattacaatactgataatgaggaattgaactagaatggagtgtcaatttgttctcacattgctataaagagatacctgagactaggtaatttataaagaaaagatatttaattggctcacagagccacaggctgtacaggaagtatgatgctggcatctgctcagtttttggggaggcctcaggaaacttacagttatggcagaaggcagaaggcaaagggggagcaggcacatcttacatggccagagcaggaacaagagagggagaggaggcaccatgcactttaaacaaccagatgttgttacaactcattcattgctgcaaggacagtgccaatgggatgttactaaactgttcatgagaaactgcccccatgatttaatcacctaccacctggctcacttctgacgttgaggattaccgttcaacatgagatttgggtgaggacacatgctctatatcaaatggtctttaactagggccccatctaacttcgaatttagaaagcaaatgagatatagaaactaggccacagaagagaaggttgaagggaagtatcattatctcagcaagacagagatggataagttacgaccagaagcagtcagtccctccctggcccacctgtgtacagaaattagcccattttctcttgacaggagagtgtactatgtagctaaattaggtttgcaactaaatcagtacagacattttgctttctctttgctataatgagaaactaatattaatataatttgatctacattcatgggttgtagtaacgaattacaggaaaggtacccaggcatggtggctcatgcttataagcccagaactttgggaggctgaggtgggaggatcacttgagactaggagtttaagaccagcctgggcaacatagtgataacccatctctacataaaatgtttaaaaaattatccaggcatggtggtgtgcacctatggtcctagctacttcagaagctgaggcaggaggatcacatgagcccaggaatccaaggctgcagtgagttgattgtggcactgcacaccaacctggaggcagcaaagccctgtctgaaaaaggaaaaataaactaagaattatggataatgaaagcaaatttcacctgcattcaccttctattagctttaacacctatgaggtgaaatctttgtatttatcattatcgttcaccggttaccaactgaagaaaaacagtaatgatatttctgctgaatcccttcatttaaactaaagagtagctctgcttgctgtctcagctcaacctgaggatgtagtgttgttttctgaagacattagtgaatctggaatcacctgattcctactggtggttcctgtagaagactatggaagtcacaaaggatgaaccaaaattttggtaaaataggctggttaatacgatatggaaacaggaatttggtttttccaaattcaggaggctagaatttcttcctacttttgagaagctccaaagcaaaaaaacacaaactttgtccatgtatagatggccagaatggttttattttcctaaaatatatgcctagtttcttttgaattcaggtggttatttgcagatccttgcttcagaaaataccagcccaactccatgcctggcttacagttggtacacagtaaacagtaacaatgattgctgttattgctatttaaaataattatgtgctgagaagggatgtcctctcccactgactgacttgtgtgcgtgagtgtgtgtgtgtgtacatgcatatgcattggcagaaaatcggttaactcttattgaacctcagtccctctgtttaaggagaataaattgtcttgcaaaactgcatggtggtacattctagctcaagttgctatgacattgatatggaagtcaacatgcttatcttggtaatgccatcattccttccttccttcattcattgattcattcataaatagctatggaaaaattttgattttggattctcgctaggtactgaggatatcatagtaaacaaacagatatggtgctgtacactcatgataacattggaagataaaactttaaagtaaataaaataatccatgtgagattaactatcacagactagccaataccagggagggctcaggaatgtaaggatgtgattagtttgaccagatgtgagagaggaccaaggagtatcctagatacaagtactttcttctctttctttgtcccagcccaggttttctcctttctaatctagctggctttcttcatccttctcagagggcattctcctctcagggttgtttcgtctcccagcaatgaccatttacgcttcacagggacagactctcccaccaagtccataaacctgcactctgtgcagaatcattgcccatttacagctgctaatgcattaataacagaaacgtccgtggccatgacctacctgagtcattacacactaatcataggaggcaatttcaagcagattgactagtgatcggtgtcctccctgacgtccaggcaggaggacacacgactgccttcacaaccccagagcagatggcccgagagcataatcacacactacagccggtgcaggtgtggctccaggaagggaaatctccatgtcttgcatgcaaagctgggctctctcacctggaggctgtgctccaaatgctcgtctttcattttggagcagaatccacatctcagggaccttctttgtgctcgttttaaacttatcacacagacagctctctgaagacatggaggaaatgagattcacctgcacctgaatggctctaacatgcaccactgtccacaagccactgtcgttccttctccactttcctctgcaatcccagtccagatgtatggtccaaagctgtggtcatcatgggcttgtgatttgtgttattatttcttccctgaagctgcttaagcattgttttttattcatgttgctctctcattccctgcgatcatcattataatggccacacaatataacatcaggatgatgtttttccgctttatcttagaatatctagtaggtttctgcttttctcactaataccagaatcactagagttaattacttagcacctatagagttttcatctttgggataagtgcctgagaagtataagtcaaaggatagaagcatctttatgactttggatatatttttctaacccattttttaatggatttgctcatttacagtcagttcgttgtattttgggctttctgctcttagctgcctattgtttatttgcccataatgaggactcagattatatttaagaggaactaggcaatgactttgcaattaggagtcaaatagaatctataccttcaagaaacagaatagagagggaatcttggttagaaaataactcattgctctatgacatgataatgtccaagaaaagaaaaaggagtttcagaatacatagattctggtgcaagacatgatttctatacagattcaagccaggagcctctcttcttgaccgatctgagatgaatgccatgttatttcttgacaaaggttaggaaatgaggggtctaatggctcttcaatcccgtgggttactgttctatccataaattcatgtataagaactttgttgcatgcaccgtggtcccagtctgcttttatggggcgtacactcagaagacagcttctgaaaatgatctgggtggaaacgtataaaggttgtgcattgccaatttgcagttgcaaaaatctggaaccagccctaatgcccatcaatcaatgagtggacaaacaaactgtgacacaaacacacataatggaatactactcagccataaaaagaaatgaattagtggctttttcagcaacctggacgggattggagactattatcctaaggaagggaaaacaaaatatcgtatgttctgactcataagtgggagctaagctatgagaatgcaaaggcataagaatgatgcaaggaactttgggcactggaggggaaagggtgggagggggatgaaggataaaagactacaaactgggttcagtgtatactcctcgggtgatgggtgcaccaaaatctcacagatcgccactaaagaacttattcatataacaaaatgccacctgttccccccaaaaaccgatggtaataattttttttaatgttgtgcattgtgaggccaaataagctaggattatttttgggtgtatatgctcaatagaccctatgggtcacatctagcagttcattaagattcaaataaacaaagcagcagtcccagtagaaaatgcacagccttggagacaaccaaatgaggattcaaatcttggccctctattcactatgtatgcaaagtaggaaagttacttaatccttctcagctccagtttcatcttctctcatgaggatggcaataggaaaccataggtctcttgtgaagattaaataaaaattcctttttgggaggaggggatgcctgttagggataaaccttttactatagagaatgggacccaaggagtatagcttgggcagtgatcatttcagcaaaagggagtcgtgattactgctctgctgagttaaagaaaaccttgtgctctgataaggaagaagagagaagagagaaaatgaaagacaaggatccaaccaacaagtgggtgggaatcagatgtctatgtgaaagaaagagtccctaggaaatcagcagctggttctgaagttcaatttgaagtggtttgctgtgtggtaaaccaatccccccgactctgtgtgcccttttctacccttccccctgaagttaatctttcctttcaaaactcatactcataatggtttgagagtgatcatggatggaagttatttcaagtgctgaattcctacctgactccatgaagtggaaagcagttgttgttcctagtcattcttaagataacagctaacatggtggaagttttgcttatgggccaggctgtgtactaagaagtttacaagcatcacctcatttcatccttataatgactgagtgagataggttctgctaattattactcttctacagatgagaaaactggaactggaagaggatacatagatttcttaaagttagacagcatgcaaaagctggagctgagtttgaattccacccatctcaactgtggagtctacgctcttgaccactatactaaactctttctatatgcagaactctgagacaaaagttccagtgggactgtaagtctcatcaaagaaatagtgacaaaggcgattgtcttcatcaggaggtggccttgaggattctggtgcctggagacctcagctaatgtctgggttatatttacaactccacttcttcaaaagatggatgaaggccaggcatggtggcccatgcctgtaatcccagcactttgggaggccaaaacgggtggatcatttgaggtcaggagttcaaaaccagccaagccaacatggtcaaaccatgtcgcttctaaaaatacaaaaagaaaaattaagtgggaatagtgtcacacacctgtaattccagctacttgggaggctgaggtaggagaatcacttgaacccaggagacagaggttgcagtgagcccagatcacatgactgcactccagcctgggtgacagaagtgagactctgtctcaaacaaataacaacaacaaaaacaaaatcaaaaaccacaaggtggatgaagttgatgactggtatgattttaaaaatattgacttctactgtgtagctttccttcatctttcccttcttccccatgcaaagaaagatgaagaacatgagcacactgtacaataatgtatgtctgtagtttaatactacatatctgtagtttaatacttagtatgcaaatattctaataaaaaagtcataaggatagggaagtaaaggaaggagaactattctaaagttcaaaaataccttattattcaaagcacatggtcttactcctgcgtagtggtggctgaaacagattgcaagctcctttcctaaggctgactctgcaaacatgaggttttgaagaacttgaaggtttcacacctgcacaaaggctcccaagaagccttgcacagcagctctcgtagtactgagctcaaagtcactgatgattctgttcaaaccctctagtccccactatgaaggctttgaaaagggatatggtgaaaggtgaggaatcagaatagggcccctaacattcctgtgatgctcttcctcatctcttccttactggaattgctgtctcactatatcaagcagggaactacagcaattcattcattcaacaagtacatagtgagtgctcttctatgctaggcatgtgctagccgcgagagacacagtgggaaaaccagacacccatgctgcctagactcaggggtcttactttctctagaggaaacaaatattagataagtaactgtacaataaaatagtataattacaaatcacagtgagtgctgcaatgtaaacacaccagcgtgtgataagaatgtatgcagtgtgtggccatttaatgtaggtgatcaaggaagtgatatttaagtggagacattctagggcaaattctctgggagaggagcaagacttcggtggttttggggaattaaaggatggtatggttagaacagaatcctagaaggggacataggatggaattgaaagagcagatatgagagagattaccatcaaggtacagacttcagattttatcctaagtgccttgggcagctcttaagggatctgaaaaagtaaggaagttagtaatacttgtgtttttaagaaagtattgatctggctactgtgttgaagaaggcttgaagaggaggcaaaaagaacagttaagtgggttattgaaatagtctggggccgggcccagtggttcacacgtgtaatcccagcacttcgggaggccaaggcaggtggacgtggtcaggagtttgagaccagcctgatcaacatggtgaaatcctatctctaataaaagtacaaaaaattagctaggcatgctggtgcatgcctgtagtcccagctactggggaggctgaggcaggagaatcatttgagcccgggaggtggaggttgcagtgagccaagttcgcaccactgcacttcatcctgggtgacagaatgaagaaaaaaagtctgggagggaaggatgacattggcttagaataggggtgagttgtgggaatggatataaatggaaggatcctccattttctgtttctctctctctctctctatatatatatatgtatataatatgtgtgtgtgtatatatatatgtgtgtgtatatatatgtgtatatatatatatataatctatctgttaatctatcttctgttttctattcagtgttgcataaatctcaaccatttgctcaattctctggtgcatcagagagtgccaccagtatgtcctaagtcctgcagaaatcatgcaattttttttgtttcacctttttttaaaaaaaaaaattgtatttatttgtgtattgccctggaaatgtacaaatagtttcttcttcccctattaaagtttgcttggtggggtcttgctggttcctgagtttgccttggctgccatcttccatcctacctaggatgacaccatttgtttcacataagtttctcatgcatgagaggctgacattcttaatagttctgtcactcctgttacaacaggctgctgaaaagaaacaagcgatgcctgcaggagatagggctgtctcagcggtttgtgtaacaccaatggggtgtgaggtagcaggaaaataattagtttagttagatgtaaatggaagacgaatgaagaaagtgctaatatgtggatgcctgggagaaggggtggcctgcctcatttaaggtttgaggaagaataattgaatgaatagctatgaaaatgaaagcaatattaagagacttgtatggcaacgtagaaggcgggaagagctaaattcgatcaaccagcatttactgagtgtttattatgtacctgtcactgtgtgaggcattttagctacactggtgggaaaaaataatggtaagacataaataagactttagaatctccgtggaagtcaaaatttcagaacatatgaatgcacaaacagatattagaaaggttggatagcaattgtaagctacattaataggcaaaactattagggatggcaggaataatgttgaatataggagacatgactgactgtgacgatagctagttgatttaaattctcagcacattacttctttccttcataaaatgttcatgtcacagcatagcgtgctgttatatcttcatacacacacatgcacacacatacacatacacatctggtcaaggcttgtgaggccacattaggggttctgggaacaggaaggtagtggagaaaaattccctctcctaaccatttagtgtataggagtctactgttttagtgaatagttcagagaacttaaaggtgttcagagaagagaaagtcagcataaaccatgccgtggactagaagggtagatgaaaggtgttggaaaaatgtagagatgaatccttcattgatgatgcccatctcttatgaaagttatagaacatagatgatcaatatattagctacaccttacagaacatgggccattctaacagatcataatcattatttaatatcttactgagagttttgattgtattttattattgatccaatgtcatgttttgatgtccttgacatgtgacattctttttttttcttttttgagacagcatcttgctctgccacctaggctggagtgcggtggcatgatgtcccctcaatgcagcctctgtctcccgggctcaagcaattctcctgactcagcctcccgagtagctgggactacagtcatgtgccaccatgtccagctgatttttgttttgtatttttcatagtgacagggttttgccatgttggccaggctggtcttgaattcctgagctcaggtgatccacatgcctcagcaccccaaagcgctgggatgacaggtgtgagccactgcgcccagccagacattctttcctttgctatactctttcatattgtttaaagctgttttgttctttggatctgatagttctgttgttttagtcctgagatttctccatttcttttctgctttttattcagtgttttttcaaatctccctttgtcatcatagcttctctttgcctcacattcttttctatcacttgtcaaatttctcatcagcttttcatccttgatttttcagagtttggtttacgaaatggtccagtcatttctacacctctgaaaaactcttaaaattaaaaaatatatatatcagaaatggatacaggcttattttcgtggatggacttaagtttagaataggtggcatatgtttaagtttttagatcacagacattaggaattggcttttaaaagatgttacatcaacgaatggttagaaagcagtaacatcttttctacaaagatacttgtcatctgtcagatttatttatcagttaataataaagtgatttttcatatcactagatgattttctactgtctcattagttgaagaaatcaaaagaaagccaccctatgctaactcatagaagggcataactatttagtaccccgagggccaaagaacaattaaagtgaattaaaattatttcttttttggtgggggtaggggggagcaggaaacagaatgactagactccgaaggatttttctagagaaatattttaaccattgagtaaattttccttgattaaagaaggaaataacaacttggagaggaaatctaagtattactttagggttattgagagatgccggctagtggtacttggaaagataaggacaacttgtcagccactccacagagaagtagttttattaaaagtcaacgaaagtggccaggtgtggtggctcacgcctgtaatcctagcgctttgggaggccaaggtgggcagatttcctgagctccggagtttgagactagcctgggcaacatggtgaaaccccatctctactaaaatacaaagaattagccaggcatgttggtgtgcgcctgtagtcccagctactcaggaagctgaagcaggagaattgcttgaacccaggaggtctaggttgcagtgagccgagatcatgccactgcactccagcctggacaacagagcaagatagcatctcaaaaaaaaaaaaaaaaatcaaagaaatatgctagaatcgtcattatatattgagaaataagattcaatatcccatagatttaggcactcttcacatctgtgtatctggattgggtcatagggagttttattccaggctgagtgaaataagacagaggacaggcaagtagatttcttcttgcttgccagttctcattcgcagaggatccctgtagttctgttgagaattcattggaactcagccggaaagtgctgagattgattagcaatgtcttccatgggtacaggaaggggaggtggcaggtaacatatataccagcttttgccattctgctctagacagaagaaacttttcccctgtggtcaaagagggagagatatttgcttctggagactggatctacttgggttggtgaatgcattttaagatgacctggtttcatattactgtcaagcaagagagaacagtgtcatcctataatgtcaggagtaatgttacagttcagttgggaatacctattatgcctgttagtatttctaactaaatcccctttcgatgtgatagtttaattgtaggaacatttttctgcagttttgtttagggaatactgcttgcttagcgcttaatccatttatactattggattctgttgcaaatgacactcacactggaatgtgtgttagacacgtaaggcagacgggaagatggttccattcatttcagagaaatgggaggcaaaagtgagtaggatggctttgaaggtggtggtcttatgtttgaatgcgcgtcaggccccaggtggtaggtcttggtactgcatgctgctttattcatgcatctctctaaacaaatacgtcctcagagaagagagccaggagagggaggaagttctagaaatgtgctattggtaaatatacctaaagacagtggcatttctttaaccatgttcatcataatgagaaatgcagtaaatatgaaaataaaaaatcaggccgggcgcggtggttcacgcctgtaatcccagcactttgggaggccgaggctggtggatcacgaggtcaagagattgagaccctcctggccaacatggtgaaacctcgtctctactaaaaatacaaaaattagctgggtgtgttgacgcgcgcctgtaaccccagctacttgggaggctgaagcaggagaatcggttgaacccgggagccggagattgcagtaagctgagatcgcaccactacagtccagcctgggggatacagcaagactgtctccaaaaaaaaaaaaaagaaaaaaaaaagaaaagaaaagaaaagaaaaaataaaacaaaaaaatggaaaatctgtagtaaagtcagagaacctgcattgtgatatttcctatgtccatatgtccatcattgttctccaggtattgcctggttttccagcctcacagtaggcagtgggtgagagacgcagcatgatgggagaatgaagcccattcatagtggaatcaagcctccatctttgacctcagtctgtgaccttggcagcttcttgactctgtgagccttggtttcctcttttggtaaatggaacaacaaatggatacttgcaaataagaaggcttaaataactgtgatatatatatattcatatatatacatatacatatatatatatatatatatatatatatttttttttttttttttttttttttttttttttttgagatggagtctcgctctgtcgcccaggctggagtgcagtggcgagatctcggctcactgcaagctccgcctcccaggttcacgccattctgcctcagcctcccgtgtagctgggactataggcgcccgccaccacgcctggctaattttttgtatttttagtagagacggggaactgtgatttatttttagtctcagttgaaatggggaccctatggctctgagaagtcaagacccactggtaagtaaatgtcagagctagctttgaacttcagcattcttcctacagagctgatatctcatgatgtgctgtagagagggctggatttataatctagagagggctggatgttgattctaaaactagtgcttcagttccagcctcatcacacaccacccgggagaactttgccagttgtcaacttccttggcctctgtctcctcatctctgaaagccataagattctgtaaagaggtgggggggaaattggatgagatgatagatgtggagacagtttgcacagcaggacaggctatgcagtgggaaagtaccactgtaaggaagactggatgtatagctgcagaaggtcagagaagacatagaaaatcctttaacacctgagtgaaaacgatccatgacaaatgaagttacttcatttaaaaagagcctagtcagagttttatcatattcaagaaatatcatttattggcaatctactatctgcaaaatcactgttcgagtttttctttgtgatccagagcagtttacattgcaacccttattctaaaggaactcaaaatggcattgaggaaagcatttttcaatctgacccattttttggaacccaagagttcagagcactttatattactcgacagtttatttccatggagggagtctataaatgctttatatttatccatgttatgaattaatgcatttctgaagaaatccacccaccatgtggcatgttgattccccttttctctcatttcccccaaaacaccaaagaaggagggccctatgaggttcaatggtctcctttaatggtgcatttaaagtcgacatgctgatgccaagtctttctgtattgtgccgtcccaacagggatggcttcttagcagcgaatatggggtgagtaatttgaatcaccgccatcaacctgaaaagccaaagttgttccaggataacccaaaccagaacaaacctcagatatttgcaggtgaaagaacgagaatacgaatatatgttgtgggctgggagagccaaaatggcaaaggagtggaaataaattaatggggggaaatgattgatgtggaagtaagtctctcaattgtacacctggatgccacattcttacaagcagcccagtagaggcagatatataggctacaaagacacgtgctgtcaagcagcaagcactacttattgtctctgttttctctctaattgatacgtgtcttaggaaagcttaggtaatcacttggcaaaacacatctttataagaccatctctgtaaaaaaaataaaagtattaaagtgacagtggcacagaaaatcataagaaaatttttccacgttgagacgaatcctcctgcctcttcttgagaatccctccaaagatatcctgtatgtctgccttgtgagaaaacacccccttgggtacaaactggtcaatatcaggaaggcagcatgctcatatctcagtcccaatgcatgccaaatcactaagtggatggcattttcacaaagtcagaaaagcgacagttttattctcaaggttttgttactatgtttcatgatgtgcaagcaatactttggacaattttatccagatggttttgtccaggtaatttttgtctgcaatatgtgaaatacgtgatattctactatcagatactttggattactgttttttagtggtgagaataaaaagataccttcattttccattaagtattacattttatgaatattttccccacctcttcacttgaataccttcccactgcaacacacacacctacacctgtattccttttgatccataattataagcttttgaagggattatatcaagattacctatttttaataccatgttaataattagacaacttgccaatgttgaagtttgttaaggtcctctccatcacaattcctgagctaattactagaatatcagtcagtaggttctaaatcaaaaactctgggcgtgtgcctagatggaaatctgaatttttaataggcagatgagttgatctttattaatagtagtttgaaaactaacacagttcaagcaaaaacaaattctcatacagttgagcactgggactaaaatatttttttaaaaacttggtcactggatgaaatctaagttcttggctttctcttaaagagtactttaaaggttagaaatccacaacagtggctacctggttatgtaattccaaattcattcctcttctaagacatacaatggcactcaagagacctgaaaaagttagttcttcttcaaagagtgcatgtttaaccaacttctcaaaccaggtgaccattattatgttcactttcaaaagtacggaacaatttgaacctgtagaaatgtatccaaaggaacttaatcttttattttgtggtaggtacacaataaaagttttcttcattgaatgaattagtcaagaactcattctcataatgcaggagaatgaaatgggaaggggtgaggggtggcatagctctaggagactggcatgattacagatttgggtaattcccaggatccagtagcctggggcagacttagacaattagatagaaggatcaggagtggaatggaatatggcaagaaatgtatgtgcatgcagtgaaagcgggcagaaaacaaaactcattgattcattaaatgaatattttatggaatacttactgtatgccaggcactgtgctgctgaggaaggccaagttgacagagtaactggccatcccaggatttccacaattgaggagtgtccttagaggtgggactttcatactaaagccagggaaatgccaagcaacccaacctgagtcaatcatcttgaacttgaagaagtgctgtgattttaataggtttgttgcctgatgtgtgcagcaagtcaataggagacactgggttacagcagagaaagtggtttaattatggggctgctgaacgaggagcagcaaacatcaaatccatctcccggaggagctgagggctagggttcttggagagggctaaaatgtggagatcattcattgatcaaagaggtcatcgtaaagtcatggacagggaggtaaacagtattctcatactgattctgttcctctctgggaggtctttaaactggttggcatcagctgtttcactggaatgttggatttgataaacatcttaagcgattcctttattttttattttattttattttattttattttattttattttttgagagagtctcgctctgtcacccaggctggagtgcagtggtgtgatcttgactcactgaatcctctgcctcccaggttcaagcgattctcctgcctcagcctcctgagtagctgggattacaggtgcctgccaccatgcccagctgatttttttttatttctatttttagtagagagagggttttaccatcttggccaggctggtcttgaactccagacctcatgatccacccacctcgtcctcctaaagtgctgggattacaggcatgagccaccgtgcccagcccatcttaagcaattcttaaacaaaagctttatgattctagtatcagaaatcctatgtacaggaacaatggggatgcaaaaggttggtatctagtgactttcagttagaaggaagtggaacaaagtgcagcctgattaatacttaattatgaccatatttctgcccaaaattcttgttaaccatgtgaggatggcttcagtgctaacaagagtgatgaatagtatgggtgctaaggggtcacgaaacaggccgtccgactatctgcagcaaggggacaggaagtataggggttgggggagagttaggcctagctcactcatgacctaaattagttactggtgttaccgaaaatgggtttggatccagactctaagacagggttcttggatctcaagcaagaagtaatttagggcaaatccacagagtaaagtgaaagaaagtttcttaggaaagtgaaggaataaaggaatggctacctcataggcagagcagcaacaagggctgctggttgcctgtttttatgattatttcttgatgatatgctaaacaaggggaggattatttatgccttccctttttagaccatgtagggtaacttcctgacgttgccttgtatttgtaaactgtcatggcactggtgggagtgtagcagtgaggacaaccagaggtcattcccattgccatcttggtattggtggatcttggcttctttactgcaacctgttttatgagcaaggtctttatgacctgtatcttgtgctgacctcctgtctcatcctgtggcttagaattccttactatctgggaatgcagcccagtaggtcttagcctccttttacgcagcccctattcaatatggagttgcccttgttcacatgcctttgacacaagagtgagccagggaaagagagacattcaaaggagaggtaacagcacttctggggacctgggggatcacaagcattaggaaaaccagaagaaaaaaggggaaggggtggacagagagtggcacagaatgaagccacagagatgggcagtgtccactgtctctagggtcttgtagggcatgtgtaagctttccactgatgctgcatcaaatgatcacaaatcattgatttaaaaccatgcaaattttctgtcttacagttctggaagttaaaagtctaacatgggtcttactgagctaaaatcaaggtgtcaatggggcagcattccttctgaactctctatgggaaagaacctgtttccttgcttttttttggccactagaggctgcctacattccttggcttgtggcgtccttccattttcaaagccgacaatggcaggttgagtctctttcacatcaaatccctctgatactgactcttcttttacctcgttcttctccatcttgtataggagatgagtaaaaggaggttgagacttcctgggcggcattcataggaagttagggattcctagcctctagatatttacagttaagggaacagattaataatgtttactaaacagacccaggctcagaatgtcctgatatccccatatcttgaaaacaaaaggattcctaattttgctttaaagataataatgctgattcttgcaaaatatagtaattaagaaaattaatcctttatcacaaaccctgatagtaaagcacatcttcccattttttttttgttatgctgtatataaacaagcattgtacatagggtggctggtttcctcctcttacattatgaatgtcctactctgtctatggagtagctgttatttcaccactttactttctaaataaacttgcttttggtttgcattgtgggctctccctgaattctttcttacacaaaatccaagaaccgtttattggagtccaaatcaggactgctttctggtgacacttttaacgattctcgtgattccactgaacccacctggatcattcagaataatttcttgcgtaaggtcaactgattagcaaccttaattccatctacaaccttaattctcctttgcaataaaacataaaatacttacaggttccaggaagtagcatgtggacactgttggggggcctattattctgcctagcacagggcacagtaaggattttgtgcaaattcaaacaggaattggcaaactatcaaagccctgctttgaaggggagtgatggtggtcaatttgcatttcaaaggatcactctgctgcaatgtgggaatggaggcaagcttgtgtaagggattatcagttgggaagctgttgcagagctcctggggagagatggcggtggtctggactaggatggcaccacgaagatggacatgtggaaatgcattctggctatattaaacagggagaattgacatgaattagagatagattaaaaacaagtagaaacgaaggatcccatgttttgccatggcaatcttttcacattgaatgaatacaaaacgtcaaggtgcttagcatagactagcccatgaatggcacataacagaaacaaccttgataaggttcctgtctctaaatttaaagatgtgcacagcaacctcacgagattcaaggttgaggcattgagggtagaagaagtaatgaagttaggtaggttttgctgagtggcatccacgtggatgtctattagagagttaggtatacatatctgaggttcagaatgcacattcctgtccatttcttccaaatataacctttattcctctaaatgctttttgtgaaatgtgtttggtatttgataaatctcttcggtgcgtatctccaaatttggagataggaaccttatcaaggttatttctgttatatgccactcacaagctcgtctatgctaatcaccttgacattttgtattcatttggtgtgagaggaatgctttatcctacattgatggggacacttgtttctaatgagaaatctgatgaaatcaggtgctttgaatacagatcatctccaaacttctgtcgctttatattttttctgaagtttgtctcctccctttaggagaccatggtttttgatacgaaactccatctgatagtcatttctgataaggattttacttttaaatccatcaaaagggaggagaagtgacaatttaaagtgggcagatggaaaaatgagtctcttggtctttctttatttcttatacccctcttcctctctgttcttttcacaaaagatagtctcatcagaaattcggggaaaaatggcttttcattcttattctcattttctgacattcttactctacagtcattattaatgtagaaaactctgtctattaggtaatctgtgtcttcccctaccctggtggtatttcattatcatttaaatatgccacccactgctccttctcaaaccttttgaatagagggtcattagtagatttttccccctaaattatgctcagcagttgttaaaggaagatagtcttcagggaagttctttctacattgaagaactgaagtgaggatttgcgataattatctggataactcagcctcttcttatccctcctgaggtggaacatatttcctgttctctttcattccttccttctttcatttcttatggattatctttgccacaaacaacaacaataataaccaaaacaaaaccaaataaggtattcatgtttccatgcttcctatagatgtagaaagtttttaaaaagtgttttttgaattgctagctactgtttaaaaattaatacaaatgcatgtcaaacttcctatgagacattttaaagcaggactcgtcttgagatttgaatcagtcgtctttctcagtcattttgggggattaattctgtgttttccatgcataatattccctttggattaaggattactatgaacctgggctttgtcttcatccttaagaatcaccatcccctgagaattaaagatgatgcttctcatgtaaattgcttgaggttttcacgagtctctggctgttacaaatgtcagctgagcacagtctaattctaatcttagcagagtaacctctcctgggcatcggagactgtgatgaaaggaggtaatcagtccttcttcatctctatttctcgtacccagtgccacctgatatgcatcatggaaactgttgttggaggatcaatgtctaggagaggcactgcttgatcttatgcaacctccacctcccgggttcaaatgattctcatgcctcagtagctaggattacaggtgcctgctgccacacccggctaatttttatatttttagtagacacggggtttcaccatgttggccaggatggtctctaactctgagcctcaagtgatccacccaccttggcctcccaaaatgctgcaattacaagcatgagccaccatgcccggcctggtattatacaattacacaatctttccttctctcttcttcttttttcttttttttcttttttttttttgagacagagtctctatcgcccaggctggagtgcagtggcacaatctcagcgcactgcatgctctgcctcccgggttcacgccattctcctgcctcagcctcctgagtagctgggactataggtacccaccactgcgcccggctaattttttgtatttttagtagagacggcgtttcagcgtgttagccaggatggtttccatctcctgacctcgtgatttgcctgcctcggcctcccaaagtgctgggattacaggcgtgagccaccgagcccggtttttttttttttttttttttgagactgctctgtcgccaaggctggagtgcagtgatatgatctcggcttactgcaacctccaccacctgggttcaagcgattctcctgcctcagcctcccgagtggctaggattataggcatgtgccaccatgctccactaatttttctatttttagtagacacgaggtttcaccaggttggccaggctggtcttgaatttctggcctcccaaagggaggattacaggtgtgagccaccgagcccggcctggtcttacagaatctttgtgagcatcaagtctgtcatttgtaaaacaagaacaatatatggcggcttttagggtgttatgatgatacagtaggatgagatgtttggaagagcaagacactagattcttgtgaagcaaagcattctcctgtttgccacttccttgttctctcctaggtagacttaaacagctcctgctgcagagtagatgaatccccacattggcgctgcgtccaggagggttcttggctttacccagaagagaattcaagggtgagccaggtgtgttaaacagtaacttttattgaagcaactgcgtactgctccttacagagcagggctccccctataggcagtgtgcccagaggcagttctgcagcaatatttatgcccacttttaattacatggaaattaaggggcagatgatacagacatttctaggaaatgggtggtcatttccaggtgttgccatggcagtggtaaaccgacatggcaggctggtgtgcatgtctaatggaaagctgcttctcccccagccctgttttagcgagtcctctatccgacctggtatgggaatccccacatccagagtcagttgccacctcctacctcacttccatcatcctttatacttactcggtcccagctacatggcagacataatcctaggtgtgaggatgtgttgggagcaaactcgagtttctcccttcatggagcttacattctaaaagagggatcagatgttgacacatgtgaacccatacaatctaagactggtctcagttaatttagaaagtttattttgccaaggttgaggatgtgtgcctgtgacacggcctcaggaggtcctgacgacatgtgcgcaaggtggttggggcacagcttggttttctacattttagggaaacataagacatcaatcaatacatgtaagaaatacgttggtttggtctggaaaggcaggacaactcgaaacaaaggcaggaagactcaaagcggggagggggattccaggtcacagataggtgggatacaaagtggttgtgttgttgagtttctgattagcctttccaaaggaggcaatcaggtatgcatttatctcagtgagcagagggatgactttgaatagaatgggaggcaggttggccctaagcatttcccagcttgacttttccctttagcttagtaatttggggggcccaaggtattttcctttccaacacatatgcaagtgaatacttattatatatagtgccaataatgagcccaaaacaagcaatccatctgagagaatagaagcggccagaaggtactgctgtagatagtgttgttaaatttaactatatttggcctgaggatgcctctgtgactgagtccttagttaacaaactacagcctaatttagtatgtgaactaagtgaaagcctaacttgggaatgtgagtctgtaacaggttgctgagtctcagccaatcacggcagctcagcttcagataatcccaggcggccaagggatcaggtactgttccaacgaggcaaggctgatctgtaactaatcaaggtgcttccctacctcacttctgttttctgtccataaaggctgactgcctgtgttgaggagtggagctctctgaaactcttctggttccgatggcagcctgattctcgaattgttccttgctcaattaaactctgttagatttaatttgtctatagtttttttattttaacagtgtcttgataatgcctcaagaaatgcctttttgaggttatgatgttggagcagagagttgaaataacttcgtaattgaggcttgtcttgggatggttgatgttagtcatgtcaaacgctggatctctcatatattaccagaataacctcttgacaagacagagttttctgtttaactgaattatgggagagcactacctcaacagagtcttggtggtgttccaggaggatgggcaaattcaggatatttattgagatttcaatgtgtgttgtaaggtgggtctttccatgtacagccttgtttacattgaataaagatcatgatattatagtttagaatagatggacagagcaaggcaaggatattgggctgaggagttcaaagaatcttagggtgaaagtggccatttgatgctttctcttcaagagtaagtgggtctctgaagaagttcctggaatgggcaataaagccatttggacttttaactttctggccaagagtttcctggaatagtaaagtgatgtgaagaagagagtcaactagggaagtcatggtaatgtagacagtgaacgggagatggttctcatcctcaaccaccatcatcatcattgtctctcctctttactgggggcttcatgtgtgctgcatactatgcttggttctaaagatacagctgtgaacaaacaggcatgttcctttcttctcatttggcttataatctacccgtgaaggtagatgctaaacaaatggttgcatgagttaattacaaatgcaatagttgctgtgaaaagaatgttcttcactatgacagtgtagtgtcaatcatggggcgctgtggaggcctgggagtaactgagagaggctttgcatcttgcatatgcatagatgctagctgggtgaaggacgcaagagacggttgggtgaaggagactgaagtttatcttagagcaaggagaaacaaaatgtccctgtatatcaacaattattatatcctatgttcacagagaacttgacacaaataatatcataagacacattcacagtacacagtgacagtgcttggaaacatcaaaattgacagtctacctgcgactgcctggcccattcctctaactaaacagcagttgtttgttgaaagaatgagtgaatgttgaattaatcaacaccatttagttcctcagtgacctccaacagctcatttgctcatgcagatcatacagaaactggtgagaagacatgtttgcatctcagcctagcttactcctgaatacaagaaagcaggaaaacaggccttcaggcgtgaaagtgggtggtggaaacccagcccgttcatacctcttggtcaagtttagctatcctaagtgtgggaggcagagaaggggaaagaggcaggagtgctctgagggaggttatagctttatgggtttgtgtggtttgaggtctttgctcttggttttgagcactgtaggagaggagataggcttgtgataaaatgtggggcacatgtggggtcaggccatccaggttcacactccagctccactgtttaggagctgtgtaaactcaggcaaatcatttagttccttcttgtctatttgtctcctctgtaaaagagagatggtatagatgacaccatatgcttcttggagaattgaatgagatacttcagtagaaagcacttatacagagacttatatggcatttctatggcaaatgctgcccttacgtcaggggaaatctctttgccctgttgtagtcctactcatgcttggtgagatggtatatcagcctgttcttgcactgctataaggaaatacctgagacggggtaatttataaagaaatgagcattaattggatcatggttctgcacgctgtacaggaaagatggcagaatctgcatctggggaggcctcagggagcttttactcatgacggaaggcaaagcaggaggaggcatctcagagcaggagcaggactgagggtggggagcgtgccacgttcttttaaacaaccggatgtcccgagaactctctcaggagacagcaccaaggggatggtgctaaccattcatgaaggatccacacccttgatcccatcacctcccatcaggccccacctccaacactggggattacaactgaacgtgagatttggacggagacacagatccaaaccatatcagatggcaacccaggaaaagcagatttcaggtgtactatgcttttctggggatagagatggacagaggcagatttgctcatttttggaagtcaagcgcttcaaaagaaattcttatcttgagatttgattcctgattttatcaggatcttacagcagacttcttcatggaaaagaataactgttggctaggcgagctgatgctgtgccgtgggttgctatctctttcaaattcctatctgcagtaacctctgtctctctgaggttgaaccaaacacatacttattttgagctgaattttagacaggtttagagcagccagaaaaaaagcagaaaagtgcccttcagaactcaaagcagataaaactttctgttatcccttacctagccgacgacttgagtgtagaattcactcagctgataaggaggctgacattttacctcttagaagttttgtcagataaaagatgtgcaagccatgtttaccatccactctgtgtttcaaacttttgataatagatttaaagaaaaaatcatcgagatacgaatattgtggtaaaataaagctaccccatagaattaaaataatgaggatcaaagaaaggctcaaattgttcaacatcctttaaaaggatccctttgagaaaagctgacttcttgacctatgtcattagtggttggtaaacaatttgcatggcttactaggattacactaatgttcctgactccagctccagcttgcagagagtgcaggtacagtcctattgagaacacatcttcatctctagagagcaaacctggcattaacaatgggagctaaatagaaaatcatggcatttcccatgaaaaaaagagtaacattaagtgctgggctaattgtcaagtggagggttggatatcttctccatttttccccatggttttccaatactttataggaaaaatgattaataagatatccaactccaagaattcagaggtccaaggagataagaaaggaaggcaagttggtttagaactcgtgtcttctacaggggatgccatggggggcagtggtgagcttaactgctggagatttccatggtgaatgtgcgtgtctctccttggcaaaacatgtagaaaagagacttttactattaattactttggtacgctcaagtatccttctcaaagcccttaaaatttcaaaaagtcctaggtttgtgaaaaatcatgcaattgatattggattcaatttatttgtggcgtatagacaaaaattcagatgaagaaatcgtaaaaaatacatggtgtttcacgcctgtaatcccagctctttaggaggctaaggcgggcagattgcctgaggtcgggagttcgagaccagcctgaccagcatggagaaaccctgtctctactaaaaatacaaaattagccgggtgtggttgcgttgcgcatgcctgtaatactatctactcgggaggctgaggcaggagaagcacttgaacccaggaggcagaggttgctgtgagccgagatcgcaccattgcgctccagcctgggcaacaagagtgaaactctgtctcaagaaaaaaaaaaaaaaaaaaaaaaaaaaaaaaaaaaaaaaaaaaaaaaaaaaaaaaacagtgttctctagaatatacttcccaacttctaagtacttcatttaactagttttagggaatgtttatttaactaaggtgatgcctgaatgccaacaatggcatccatacatctatgaaagaccttttactagtaaccttttaaatcacttctctgttgataatcaccaccctcttgtgagtaattactaggtcctaaagcattgtccatggattttcatatttaagcctcattaacaacactaggaggtaggtggcattaattctgttttattaataagttcaacaaaaacttaaagagtgcaagtcatactcatcagcaaggatgcctagctcacaagtggatgcatggggatttgaaccagggtctgaaaacttggaggcctaggtttctatgagggcactcttctgcctcccttagtggtggatggcctggcacctggtcctcaccacgaaatgcctgaaatgaagaccacaggcagtgggcacttggctgacaagtagcaacttgtgcaaagttgtgatatgtcatcttatcctttcagttttctcctgttgcctttcaaccacagcaatgtggccaaaacttacgaagcaggagttttatgacataaaagacataatggagtccctgtcttgacctggggaggcaggttagcttacagggaaagatacataatctttataagagaatattttcatgtgtgcggatagtaaatatacaactgtgtaattatatatatgcatatgcgtttgaattgtattctaatatatacaagaatatatataaaataatattgtatacataaaatatatatatataacgtgtgtgtgtgtgtgtgtgtgtgtgtgtgtatatatatatatatatatatttttttttttttttcttgaggcagagttttgctcttgttgcccaggctggagtgcagtggcatgatgtcggctcactgcaacctctatctcccaggttcaagcgattctcttgcctcagcctcccaagcagctgggactacaggcacctgccaccctgcccagctaacttttgtgattttggtagagacagggtttcactattttggccagggtggtctcgaactcctgacctcaggtgatccgcccgtcttggcctcccaaaatgttgggattacaggcataagccaccgctcccggcctaagggaatgttttcatgtgtgtgtatactaaatatacaagtgtgtaattatatgtatgcatacatatatgtttgaattgtattctcatatattaaatacatgttatttcagaaatggaaggcaaaataaggatattagcatttcctgaggtacgtaaaatgttgggtgctttgcacgtctgacctcatttattttacaacctacctacaagatatgcattattttcatcattccaccaatggggagtatacgggagatgctgtaactggtataaatgcacagaatttatacactgcagaaccagcatttgagttcatggctgtatttacccaaacctaccctttttcagtgcttttttctgtctgttgggcagggagagacattagaatgagctggaggtatcacagatggataaggtacaattgagagtttgtagaggtttctccagtcactttatataataaaaagcaaccagctatctcaagtcccagacctcccagccctatattctctgctttattttcctccttagctcttatccttatctggaatgttgtgtattaacttgtttcctccatctagtttataaatgctatttaggcaggggggttgtttcttttgttgctaggaccattgtacctaaagtagtacttgacccatcatagataaactatccgtatttgttgaaataatgatgccacctataatcaaacaaattcaggacaaatgaccaaaatttagtgtttatgttgaacaattatgaccatcaatgatcaatcatgaatgtggattacaatggaattttactttgaaaattttctaaacactagtttttgttttgtttttgtagcccagggaacaaaggagggcactgagagctgtgagtggagatagcaaaacaaaaaaacaaacaaacaaaatcgtctatttatcctgtccttgctttgggttaccatgcgaagtcattcattacttttagaaataattcatacattgctcaaaaaggatatcctgcgtgtttgatacaaagggcatttatcatattgaagcagctaaaacttttcaatcccatccattaactcacgaagctgcaagttactgcgacgctgccttgcccatctatttagtatttccaggcaatcatggtacagtacaaagcaatttgtttttatataatttccttcatgctcgcaaacacaacatgcatcacagggaaagccaatcatgaactaaagagaaaaagggatgatttaaagcgggagagtggttcatttgctttggggcatgagaaacaattatttcaagaggccagggtttctgtgggaagtcaggtgaataagaatgctagtgctggccggctgctttctcggagaaactgctttgcctaagtaacttcttcttttgagaggatttcttactgagccataaatgcttctaatgtgaggaaggctaaatccgcctcctataaacctgggagccatagttccatttctccccatctttcccaaagatcatctcctctaccattgaaggacaatgggaaatgctgccgcttttatcatacgtcctccatctgaaatgcacttggatttcagccacgtttgagaacctaatcttccaataaactcctttagctctatgagagatttccattaatttatttatttctgtgcttgtttgttttttgggatgggtattagctcatttgccatcctagatacctattttttaacttccttggtgttttactgacaaatataacttgtcatttatttgatttctgtaataagctgcaaagtacttatggtcccttttaagtgtagggcatggtgctgggtttaggcatggggatggtctcaggagactttgctggacctagagagccaggtaggatgggtccttaagcccaaatgcattgcttgtgggggattcaaagacttatctaagattcctttgaattcaaagggggcttgtatctaaggaccctcgatgtccctagccctttgttccctgtagtgtcacttggttatttcggccacaaagtctttgctacactggtttccataaaattcatgcaagcgaacggtgagtttaatccacgttgaggaagatctgaaggacattggagtgcccctgtctcttaaggcacagtccacatgacacgttcctgggctctggtgttcttcctgcttttcctgccttcagtgaagaacttgttcatgtcttcttttcttcccacctttagtctccttttctagaagcataaacacataaacagttcacgcctgtagtcccagtactttgggacgccaaggccggtggatcacctgaggtcaggagttgaagaccagcctcaccaatatggtgagaccccgtctctaccaaaaatacaaaaattagccaggcctggtggcatgcgtctgtagtcccagctactggggaggctgaggtgggaggatcgcttgaactcaggaggtggatgttggagtgagccgagatcatgctagtgcaccccagcctgggtgacagagcgagacactgggtcaacacacagacacacacacacacacacatagatatatataaaaaaaatagcaacagttttccgaaacatgtttcagagagcttttggcttctgttgctctctgtccatcaccagtctccagcaggacccgcctgctctccaccctatcttcgtttctttgtctgaccactcatcacctctccgcttccactctgagtctgcaccagtctcttctccacacagcagcgaaaccagtgttccaaaacgctgtcttgatcaggttgatgtccctgactgatagcttcagaggctcaaggtcaaacatctttcccaagatcaggaccaaactccttcctatgatctcgcaggcccctgccctcttcctctggctcattccccttctgtttcctcttcctgactgtatactagctgcaagagtctttcattcccttgaaagtattttgcttccttccatcacagagtttttgcacaggccgttcctgtacctggaacatttctcctccctcggtctcactaatctctgaaaccacttgtgtctgtagtctggtgatgcatcttcagtgtttaacaaaaattcatggcacttactaatagaagatgctcattaactactgaaggaatcagtgaatgaatgatcaataaatgaataaataaactgggagtcctgaggttaccgtcatcttgatataccagtgttcacataaggagacccaagtgctctgcagatatttgtcctaaaaagccataggtagttgcaggttattacaggttttcttcctctgacagcccagaggacataggagcctgacttcccagtagcaaagaacacacttagcatcctcatcttggtttctaagaccattctccaataaccccttcaaggtattgctgattacagatatatattctgtattctttttttattattagtatactttaagttctggggtacatgtgcagaacgtgcagtcttgttacataggtatacgtgtgccatggtggtttgctgcactcatcaacccatcacctacattagatatttctcctaatgttatcactcccccagccccccagcccctaacaggccccaatgtgtgatgttcccctccctatatccatgtgttctcgttgttcaactcccacttatgagtgagaacatgcggtgtttggctttctgttgttgtgatagtttgctgagaatggtggtttccagcttcacgcatgtccctgcaaaggacatgaactcatccttttttatggctgcatagtattccatggtgtatgtgtgccacattttcttcatccagtctattattgagggacatttgggttggttccaagtctttgctattgtgaatagtgacacaataaacatacatgtgcatatgcctttatagtagaatgatttataatcctttgagtatatacccaataatgggattgctgggtcaaatggtatttctagttctagatacttgaggaatcaccacactgtcttccacaatggctgaactaatttacactcccaccaacagtgtaaaagagttcctatttctccacatcctctccagcttcttttgtttcctgactttttaatgttcgcccttcgtattctatattctttcaactagaagttggtatatacaaaatgatcaggagcaacttctatttccaaaaactaatggagttttcacaaaacaaaatgggtgtaggtcaagaaaacacatgggccaaacttaaagaactcctaatgggcaaagctgaagcaatttaaacagcagaagaaagtagcattagattatgacccaaagtattaaaataaatattcatgagtcaatagtgatagaaataaatgcatggataaattaatacatggaagtagagaaacaaatctcctgtgcagaaaaatcccagataatgtatgcacagccttcatccttgaagaggtagagcatgattctccatctttaagcactgcttttacatggtggctttcttccagagagtacagcatggagaagggaaggaaagggagcaatgttgcaggggcaaaaacctgccaaaaacatcctcagccaacagatcagggtcacgtcagccagcatgtcacattaattgttggtacccttgatcacttaaccccaggagattgaggctgccgtgagctatgattgtaccacagccctccagcctgggcaacagagcgagaacttgtcttaaaaaactattaatatattgggagaaaaatgctattttccctctgtggttttcctccccatacctataattccagtctgattatgaggaaataaacatcagatcaattcaaaattgggggacattctgtaaagtacctgagcagtacatcttacaaccgtcaaggtcttcaaaaataaagaaaaactgtgaaatagctgcagccaagagaagcgtagggagacatagcaagtaaagataccattaccgtggtatcctggatggaatcctggaacaggaaaaggacattaggcgaaaaacaagggaatcattccaagtgcagactttagttaataataaggtgtcaatatcggtttattaatctgacaaatgtccccttccaatcaaagatgttaatactagggaaagtgagtgtggatatgtgggaactctctgtactctctctgcaattttttctgtaaatccaaaagcgttctaaaaatgaaataagtctatgaaaggaaactaaaagccacaggcaatcactcctccagcagcccggtaatggattcccccttccccgtgccctgggccaagactgaactgtgattctgctgtcctgcacccggggacctctatttggagcagtatttggccaagggaagcagcgctcactctccccagtccctcccctcctgccctgcttgcggattttattttagtttgcttccaatggcactcagctgctgctacaggcaaatatctggctgctttgcacgctattgtacaacacactgggggaaaatgagccttcgtgctagagtctgggtccctgagcaaataaacagagaagaaaaatggtgcatgtgggggtggtgaggttgagggagagactggggagccaggtgattgagaagttagtggctaattcagctcagagtttgggcagaaatcctatgcttctccccattcaattttccttattccccggactcctcagaaacacccagcttattggtgggggtaaagagggtattgttttcctgggggtttctgttccaaggataagggagttggaaagagctgttgagggtgtctagccttttttactaggtggaggtcgtctgcacaagcgctctctctcttgcttgctctctctctctctcgctgtctcgctccctcttgctcccgcttgtgctctctctctctctgtcttgcttcctgctttctgagttctctactgagagctggacacagatgcagtggctcatgcctgtaatcccagcactttgggagtcctaggcgggtggatcacttgaggtcaggagttcaagaccagcctggcgaacatcgtgaaacaccctgtctctactaaaattacaaaaattagccgggcgtggtggtgggtgcctgcagtcccaactacttgggaggctgaggtaggagaattgcttgaaccctggaggtggaggtttcagtgagcttgagctgagatcgtgccacttcactccagcctgggcaacagagcaagactccatctcaaaaaagaaaaaaaaaaaaaaagaaattaatggggccagagacctttggaaatttcaatggttgtgtcaaagcaacctgaagtttcggcttcatcaacttccagaaccctttgagagtgtaaaggtgaagaggaggctctgaggctgcctggatgtaccctccaactgtgtggctttgtggaagtcgtttaacctccatgaacctcagcttcctaatgtgcagatccatgaaacactgacacctccttcatgagactgtgtaaaaattaaatgtatcaacccatacaagggacttttaacagtttctggcatcatgtaattttccagtacatgttacccctcctccaaaatcaattatgtatactttaatatgttaagtggtaacatttcacattttaccttctcttcatgtaaggaggtggagagccattgtcaggccttgtctcatcttagaaaaagattagaagttgccagcttcaacataattgtcattgagagggcttaaattttgtttggattaataattcactaattaatcccatagataaagatccagctgaagagtctcattttttcattattaacaatttgaatagatttcatttattgagcaattactatgagccagattctttacagagtgcttaaggtgattatgtctaatcctcccaacagcaggaggtagatactattattcatttcacttaccctaatgtcagagaggttaagtgactttccaagcttgcaaggctagtaagaggtgaagctggagtttggaacagggtttacagagtccagagcttgtctcctgatggatatgctacattgcttctgtttgtgaatttagagaagagtggtttaaaatatcttttatctctctgtttttatggagagaggggagaaagtgctgtttgacgaagatttattgccggagggacatattgagttcgaaacatgaagggtagcaaagctgagattctggcatctgttttcttgcttgtttatcccattgctctgtcggcgcctatagaaggtagctggtttggtttgagttccttccaaaacctggctctaaggaattaatccctaataacaaatgctcagcttgttgttgaaagggtttttgtttgtttgtttgtttgtttgtttgttttgagacggagtctagctctgtcacccaggctggagtgcagtggcacgatctcagctcactgcaacctctgccttccaggctcaagtgattctcctgcctctgcctcctgagtagctgggatgacgggtgtgtaccaccaggcctggctaattgtttgtatttttagtagagacggggtttcaccatattggccaggctggtcttgaactcctgacctcaagtgatcctcctgcctcagcccccaaagtgctgagattacagatgtgagccactgcacctggcctaaaaagggtctttttgactgttggtgatcttcattactcggtgaaggtggagactttcagccacctgataggaggatttgcagtgacttgtcttaggatgggagcacattctcataatgaaagacactcttcccaaaatgttaattcttttggtagccacatgcttgtgttaactattgctttgccactggtgtatggatacaggaaaaagcacttgaaccagaaaacatcagaccaacatgtcctgcaatgctttattcctattgctggatgtttctgcaagtaagtcactctaccaacctttcgagcatctactgtcttccacgaagggatcaggcgtgtatataagccagccttatacttatacttatacacagccgacttactgtgtttgcgacctggcatcatctaagtcaaaaaaactttggtgatattaaaaaaaatgccctcaaaacaacttaatagtatttatagaaattataaagcttcatccagtgcctaaaatgaacattgggatgttagatcattaaattaatgggatgtgatctatgtcctccgtgatttcaaaaacaccattcttttaattgttaattagagaatgtagtgattacagaacgtgaggaacaattttgcttattttcaatatgctggttgtgattatgtgaattattaactctgagcagcattcaatttcgttcatttccatggctttatgaactatttccagtatgcatctgttcttgttttcaattaaaaaaaatatagatttcagcctgtaccttgtaatgaaaataggaagaagcaggaaatgaatttcttatacatcattgtgtaatatttctttatagatttttttttttccaatgtggacctgcctggagacctgtccatgaaagatcatgaggtgccaaaattctcgcaagaaaaacttggactgttattggctatatatttaatactattatacttgcactgcagggaccaaaagtttcttatcaaatttattgagatgattttaacattctgaaacagattgtccacactatatttggaaaaaaaaatgtccaagtgatagatggatttacagcttacacctcaggtttttattatagttgacatttacacagtcttgaaagtctctactcctctgttttatagaaatggcaatgccactcagtctcatccaatattattatggagctgtaacactctggtgaaggatggaccatctattacttgacaaaccctttgtcaagtatatcatgccgtttcagaattatctgaaataatcatcacagaaattcattgacccatcttatgttttgcgaatgtatgctcgaatgttaagaagctattcatttgtttttctcagatgactaaggatggggccatgtgccacagagctccatgtctgcttttacatagttatcattgtgaatggcgccccctacagttgttcagtgtgtagtctgaaattttggagaccctgagtttcttgacattgtttgagccgaagaccgttatctttacttcaggggtggtcctttcacatcttttttattttattttattttattttatttatttttaggcaggtaatttttgcatttgaagagactctgaaatgaccaagctgagccgttgccattaatcctgtttgtctaaaagtttaatcttgagccacccctctcagcaatgcattgccactttctcatacattacaaatatgtaatatgggcaaagtaacgaatgtcatgttatcaggttatgtgtctcaatcactgaaacaggctcaaaaggaatgggacccagtgtcgaggagaagaaaggcacagaggaaagattctgacacttgaagcactgctcagcagggcaaatttggggaaaagatgtagacaagaactttagacaccaggaacaagattgagaaggtgctgagaaaagatcatggctgggccaggcgcggtggctcacacctgtaatcctagcagtttgggaggccgaggcgggtggatcacaaggtcaggagttcgagaccagcctggccaatatggtgacaccccgtgtctactaaaactacaaaaattagcctggtgtggtggctaatgcctgtagttgcagcttctcgggaggctgaggcagaagaatcgcttgaacccaggaggcggaggttgcagtgagccaagatcgcgccactgcattccagcctgggtgacacattgagactctgtctctaaaaaaaaaaaaaaaaatcatggtcaatcattcttaaagctggctaattagtgttacctggagagctttacaaaccccctaccttatctttataccaattgaatcagaatgtctggaatgagggcacaggcgtcagtgtattttaaagatttccccagatatttcttatccacagccaaaattgagaaccactgggctggaggagtgctagggaaggaaaaggaatacaggatcaaaagaacctttcatttgtttattgatccagccgtttttgttttttttcactcattcattcaacaaacacttctcatgaagtccctgtgtgatatacactgttctatgatttgaagatacagctgagaagaaaacaagcaaagccttcatgctcaaggagcttatgttctagtgtcctgaagcaaatcctttctgactcaatagaaatcaggttcacgtggcaattataacacatgacctttcattaaaagcatgacagaatcattttcatgagattgttaatttggaccacaaaacaagtcctgcccaccccacgcccccccaaaaaacaaaattaaattactaaaatttgatgtaatcgatgcatatcacatctatttgtgaaacactgctgtttctaatgcccgtccttcctctaagtactcttcaccttcatttgcctaattcttcaggagtaaacttgtaaccaaaggcaaacatcttacaaatttgatgatacttagacctgcttcccaaatgcttgggaagttttcataaaattgaatgtacataaataatacatggtcaggggttcggagacttaggcaaggtgctaaatttgtccaatatgaggccacctgctcgtatgtcatctgttggcactggctcacgcatttgtgtgccaggacatatgaaattaagtttacctgatgctctctgacagcagctttctgttacaacgtgcaaattagattaggttaaggtagagggcagagtaaatggatggcttcatagactgatactagaatcctgacggctttaaccagaaggtgactggttctggtctagcttgggtcattggtaatcacaagttcctgttattgatgcctgtgcagtggcctgtggggagatggatggcttattttttattgaattttgccgttatagccaaacatcacactggcagtgcaacttcattgaccttcaccctcgaattcgaggaaggaaggtcgaggtgtaaacagaggatggagactaaataaggtagttgtctcttgaatgttgcttggtcccccttctaagtgtgtgatacatgagcaaggctaaaaggttgtacagcctgccacctgggaaccacctcccttgggctgaagctggcatgattacttgggtcttcaaagcaggcgtgcacagtttttctctcaatatgaaatgatctaatgcaaacttgaaattctaccagaagaatcattttttaactttaaaggaatctagagttgtctctgcctcattaagtaactcaattggcttcaaaagcattttttatttatattgaaaatatagaaactgtcaacttcatcctaattttgaagactttttttctataatgtggccttccgttgtgtagtaaacttagtaaagcacctgttgtacaactcaatggcattccatcccaagggatggtttaatggcataaacgaagggccgagggaaaaataaattcagatatttaaacagactaggcaccataccctaaatctttgcttgcaaagttgaccagtgatgcacagaatgaggcagaaatactgtcaaagggactggagactgatctcgagatgttctagcgtggaatggatgggtttacttatttgtttaaataattgcgttctttggaattgcctaaattttgcacttctgccggtttaaatagagtcgaattgaggttgtttctggcaagaatgagtgtcacatttttgaagggaacagcagtgacagcacaacaacagacagttcggagactaaataccattttttaaagtttccgaagattaaatagaaaaacactccggggcttagctaaaaggctaacaggagaaacgaatttcacgtagaaatcaatcgctctgttcactgacacccagtgacagaactaataattgtgtccatgtaaaatcagaccctcttgttactttttaatgaagtctgtctgattctgtgatatttttggcctaggaaatgaaagagatgttttattaaatgaaactaggtctacataggtgaagtatctgaatataactatgtaatcatatcgtacaataaaaagaaaatataaaaaaattggaaagacatgaatgtagttcaaataagcttatccctccaagaaggcttctccgtgttttcaatggaatagtggcctgtattttgcatttgaacaatggcacaaagccattggaaggggaagaaaggtttagcctacccctcttggatccttatgccacaacgtctgttccctgctgtactgagaagtccaactctcctttgcaagccaggaaaaataggacctttttcaaattgcatgcttcgaagatgctggcagaattcaaaagtgctttctccacacagtataaagccctttacctgattaaagctggttatttggcttgccaaggtgaaaagttttcttatgttttatcttgcattttccctctcttcttccctcatttcctctcctcttcctctttctttctttctcatcttccctccaacattaaagacatttggtgcaacctcagcattattatttttaacacccaccttgccaagaagagtataactccaaggaagcttcttttttaagcagacctcatctgttctctgttggtccctgagtggtacctttcagctggccatttttccccagcggtgcatgtgaacacatgtgcgtgtgtgcaggcatgtgtgtacacacactttcatgttgatggagacatatggtcatatagaggatctttgtggtccatctagttctttagtttcaaatgtgatgtgttttatctaatatctgaaagggaaacatctttctgtgtaatttctcaccctgaattacacatttaaaccccacaaatatcagaggacattctaagaaataccttgtgggtggaaaagttgaccttttgtttccctctgcctggttggctgacttgggagagagtaactgaaggcaaagggaatgtcagagtggaggaaattcccatcctagactgggcgaggggcagggggtgtggtccttttacgatattcacccaattcagagcgccctacttctgttcaaaactgtgataagaaatatcaatatgggcatatgacagtatgtgtgggagggtacctccttcacttgtagcatctcacagggagaggtcttggcaaaggcacagtcatcaaaactgatgagcccaaaatgggattcacccttaaaaaaaaggttttgataaaattagctttcctcttaacaatctgggagtgctatcagaatagcagctataaatctgtctggtagggccctctcttcttaaaatagatggatgggtagatgaatggatagatgggtagatggatggatagagggacagatggatggggggataggtggatggatgagtaggtggatgaatggatgggtggatggatgtttggatgggtggatgggtgggtggatggatggatggatggatggatagacggatgagtggatgggtggataggtggatggatgagtagatggatggatggatgggtaggtggatgggtagatgagtgaatggatgggtggatgggtgaatggatgggtgggtggatgggtaggtgtatggataccttggatacatacatgtaatacatttaaattcttaataggtacatcttatgctcttcatgtctctttctctggggaggggcactggggtgctgacatatgctatctttttttgtggttaagaccataaggatgagaccacttcaccaattcttctaggcatgttttgaagcaatgtggtatagtggaaagaacacaggatttgaatcactggaagccagatttaggtctgagcaccatgtgctttttagcttgagtacctttgctcaagatggttaacctcagtatccatgtctgtaaaatggaaaaatgttttctaacttgctggattgttgagagaattaaaagatatctagatctaggcagatagtgtttaactcaatacctagaatagagagagcattttgattaatgggagctacagctactacttcaactgctgctaaggatctttcttgtttttactttcccctccttctctgggtgttttttttttccacgatacattttagaaatagaagccacattctaacttctttggctccttgcctgactttcatatggtctctggtcgagaatggtggccattctatgtgtgtgtgtgtgtgtgtgtgtgtgtgtgtgtgtgtgtctgcctgcctgtatctatgtctgtatctagaaaatatatatttatacctggaacatatgtacgtataaataaaattctggaagatgcatcttgctggaagatatatgtcttgatatgtatatctggaaggtatatatcttgtttttcccttgcttttgacagatgttctaaactcaccataccttttggatattgaactataaagacttctacattcctattttatacatttagaattgtgaatattgtaataaaaattcctctgacatttctcacatactacagacatcatgtcccctactttttcttcatggagagatatgagacaatgttgaacaacccagaataagccaaaatataaggaggtaagaatggattcgttgtctgaggctcaatatgacaccacctgaattttctctatatcacccttcaagggggtgaggatggctaagaccactgatacttatgtcatagcatgaacaaataataactacttaccatgtgccaggttcttctgcaggcactttacatagataattttatttaatcttcatagcaaacttagggagtagatgctagtattatcccaagtttacagaggaggcaactgagtcacagtaagctgaaatgacatgctccaggttgcagaatgatcataaagcagagccaaaattaggcaccagtgtcttttggtgtcaggaatctctgcttttgtgcttttctgtctcatgaaaatatcagagtggctctctctattgggtctcattattgcatgccattgtgggttcttctgactgtgtgtcacctttcacaaggagcatttcctacactgtgaaagtgcacatgacaattttatgtacttcttgttgaaatccttgtcttccttatgctgcccattggtgcttcacactattttcttcctcatcccacttccgcagcttgtagctcctgcctgagctttggaagtgaaagccaaagttccacctcgatgcaggtgataaaactagggcaaaatgaataaagtgagagctttgacgtcagcacgtggaacacatacacaggttatgctgaattgtaagctggacattatgtcactgtaggtttagcccttcttggattttctttgtttgtttgttttgttttgttttgttttgttttgtttttaaggtgtagtctcacaccgttgcctgggctggagtgcaatggtgtgatcttggctcactgcaacctctgcctcccgggttcaggtgattcccctgcctcagcctcctgagtagctgggattacaggcatgcaccaccatgcccggctaattttttgcatttttactagagacagggtttcactatattggtcaggctggccccgaactcctgacctcatgatccacccatctcggcctcccaaagtgctgggattacaggcgtgagccaatgcgcctggccccttcttggattttcttatgcatttgaaatcaggtaaagctaaaattgtgaatatgtaaataaaaataccatgagaacatgggagagggagctggggtgttttgctttcataggatgggagccaatgcctacatgttttctattgtatcttttggacaggtagaatgattgcaattgttaaaaaaaaaaaaaaatagggaaaatgatgccaggagcagaaagcaaagatgttttcaaagagtcagaaagactctgttccaaccacaaaccatcctatcttcccccagttaatggggttgcctaaatcgtcaactcctactgtgaaactcaaacccttgttgttccaacttaactttttgcccacagagtagtttaggacaatccaatgtcagtatggcaggtagaagtagcacaaagtaagatccatttgtgtcttgatttgagggacataaatgtcctattttctttacgtgtcttggtcaccccctcacacaggctctctgaagttgtttccgtcattttgtacccttcctcttcttctctttgtaagcttaagtttcacattcattggctgtttttctctctgaggtttcagcttcaagggattatgcatatgagacttgtattatataccctgaatgaaaaatattgaaaatatctcacagctagctggatctctcttaatccaggctttccagaaaaatggtgctgggaccacccctggaagctcagcctgccccaaaccccaggaatcttcagtctgcaagggcagaaccagataatgaaatggcatgctagcaggtagtagttctctgatctaaccactgccacacataaaaaatgctgcagctttgatttgggttttatgtcctgtgattacacggatcgtgctggttcctaatgtagacctttccagttctctgggtgtgcacctctgcatccacatctccttccaattcatggaacctcctttatttcttccctgcctgtaattcttctgctctatgatctgagcttccactcatgcccttattatttagctcttacattcctagaagagtatatgtttatctattttaccactttgggcattgtcatatgtcataggttcattcaccattcattgaacaaatggttatcaattagtcatatgtaccagtccatgtttacacatgacaggcacatcaataggtaagagaggaagagcccatgccctctgtttcaatgttggtagtaacatggcttgtgaaggttaaaagaaaaacccagaagcaacctagtcttgtcatcaaaatgagaaagtaaagatggattgtggtaaagtaacgcagtggaatactacagagcagtgaaaaataaaccaggacgaatctcacaattttagtgttggaaaaaaggaacaataggatgtgttatcctcacttgtgtaaaattgaaaacatgcttgtgtaaaattgaaactatggaaaataatgtgaaacaaattagtatatttcttagggatatatgtatatatacatgtatgtatgtgtgtatatgtatatatgtttgtcagggataactaagggattcctaatctattggtagtatttactaacttgggcataggaagcagatacatcttgtattaagtaatatactgcttatgtgccttaaatatctcattttaattttttataaacaaaattgatatgctcacttcaaattcacctaattttaagggattgaattattccttagatgtattctgctgaacttgctgggtcggatagtgtaaagattgaaaggattgatttaaaaaatggaaaaacattgtgaaggaaaaagaaaggaggcattgtttgagaacgtttgtcttagacatagcatctctacccaacagtgcaaccactcattattcctagcattgagggaagaatggttaattttggtgaaagttctagttcatatgaattcctctctttagtcctaaagttgttgggagtgaagagatctttccatgtcctcgagggctggtaggaaaaatctgtgtcttgttactaccatgttcccccaccatctttcctttataagttttaattaccctccaacctatacctcatgtaaagtttttcactatcacgcattttctacaccttctatgtacgtaaatacacatatatttttaatactcttacctatcttagtgtcagttccagacatgttgcctggttaactttgaatacttcagtgtgttcctaaaaacaaggacctaaccacaatacaattccaaaattaagaaatttaacacactggtatagtcctctggtctcatccacagtttgttttccaatttcatcaattgtcccaataatgaccttgatggcagttttgttcatggtccagaatctaatccatcatgcatttcatttagttgtcaagtctctttagtgtcttttaatccacaacagtgacagtcttgcttggtcttttatgatcttgacatttttttaagaacacatacgctgggccgggtgcggtggcttatgcctgtaatcccagcactttgggaggccgaggcaggcggatcatgagatcaggagatcgagaccgtcctggctaatgcggtgaaaacctgtctctactaaaaatacaaaaaattagctgggcggggtggcgggcggctgtagtcccagctactggggaggctgaggcaggagaatagtgtgaactcaggaggcggagcttgcagtgagccgagatcatgccactgcactctagcctgggcgacagatagagactccgtctcaaaagaaaaaaaaaaaaaaaaaaaaaaaaaaaaagaacacaccctggactgcccattgccgaatcacctgaagagagcccttcaattttaactaatcatttttgcaagcttagttgtttcagctgctacaaaaaagcacgagtcttttaaaaaggagtaaaattctgacacgtgctacaacatggacaaaccttgaaacattacgctaagtgaaagaaaccagtcgcaaaaggacaaatattgtatgattctacttatttcaggtacctaggatagtcaaattcatagagacaaagtaatatagtggttcctagggaccagggggaggatagaatggggagttgatgtttaacgggtatagaatttcagttttggaagttgagaaggttttagaatactgataatagttgcacaagaatgcaaatgttcttaatgccacttaattgaatactttaaaataattaaattggtaagttttatgtaatgtatattttgctacaattttttacaagagagtgggtcctcaatatgtaaatataatgtcaattaaaataacaagaaaacacaaggcagttatttactttgtggatgaccctcaatttgggtctttcagctgtttctttatgatcccagttggggtgtgcatttttgccagggatacccccaagtaataatgtcctgtttttcccagggtgccatattaagagacacatgatattagtttgtctattattggtgatattaacatcagtcctttggatcatatgatgtctctcagatatctccagtaaaaactttctcactgtaattaatacatagtttgggggtgggaggaatggttttagacttttaaaataccgatttgtcatcaatccttcattcactagttttaccattcattgatgattcttgtctgagtcaattatgattattacggctatcaaatgatggttttctaaccccattgcacttatatgtgtgggttggcattctatttcctttcctatatatatacatttaattacttatttcagtataaagtcatggattcgtgtttttattctatgaactacaatcggttactttcgttatttgttttgatgctcaagttgtatcatatgtattcactgggagccccttcaagctggctcctgtatcattttgacataaacccgtaagttttttttaataacatccttattccttggcaccagaagatattccaggtatatcttgacttttcttgccccagtcctagagccaggaggccatttttccacagagtaatccttcctttgattggagagtggtgtttagaaacaaagttctgggcgattatggcttctggaccctctaaatagacaatatagatagaactaggaaaaaatacacacatgcacatacacatgtatatataattatcttttcaaagccaagaatttgttaatccttcctaaggattatgttcttcccaacaggatacattatctaggttaaaatttccctgcctatctgatatcacttgttattacgagttatcttttatctgtctgttaggctgtgagacccttcagaagagagacttcatattttttgtcatctttgtatccccattgcctaggaagatgtctggtacagattaggtactaatattaattcataggattgttgggtgaaacgatggttgaatgaaaggatggttggttaggatcattgggtaggagggtggatgggtggagtggagattcgatggaaaagtatagttgggtgggaggatagttctttgggatcctgggtaggagggttgttgggtagaatggagattgggtggaagtatactcggatgagagggtggttggtaaggatctttgggtaggagtattgttgggtggaatagagattgggtggaagtatactcggatggaaggatagttggttaggatctttgggtaggaggatggttgggtggagtggagacttggtggaagtatagtcggatggaaggatggttggttaggatctttgggtaggaggatggttgggtggaatggagaattggtggaagagtatagttggatggaaggatagttggttaggatctttgggtaggagtattgttggatggaatggagattgggtggaagtatagttggatggaaggatagctggttaggatctttgggtaggaggatggttgggtggaatggagattgggtggaagagtagagttggatggaaggatagttcattgggatcactgggcaggagttttgttgggtggaaaggagaatgggtggaagtatagttggatggaaggatagttggtgaggatctttggataggaggatagttgggtggaatggagattgggtggaagtatagttggatggaaggacagttggttaggattgttgggtaggagtattgttgggtggaatggagattgggtggaagtataactggatgggaggatggttggttaggatctttgggtaggagtacggtcgggtggaatggagatttgatggaagagtatagttggatggaagcgtagttggttaggattgttgggtaggaggattgttgtgtagaatggagattgggtggaagtatagtcggatgggagggtggttggtaaggatctttgggtaggaggatggttgggtggaatggagattcagtggcagagtatagttggatggaaggatagttcattgtgatcactgggtaggagtattgttgggtggaatggagattgggtggaagtataactgtatgggaggattgttgtttaggatctttgggtaggaggatgtttgggtggagtggagattcagcggaagtgtatagttggatagaaggatagttcgttgggatcactgggtaggaggatagtgtagaatgaagattgggtggaagtattgtcggatgggaggatggttggtaaggatctttgtgtaggaggatggttgggtggaatggagattcggcggaagagtatagttggatggaaggatagttttttaggatcactgggtaggagcattgttgggtgcaatggagattgggtggaagtataactggatgggaggatggttggttaggatctttgggtaggaggatggttggtggaatggagattcagtggaaatgtatagttggatacaaggatagttcattgggatcacagggtacgaggattgttgtgtagaatggagattgggtggaagtatagtcggatgagaggatggttggcaaaatctttgagtaggaggatgattgggtggaatggagattgggtagatatacagttggatggaagaatggttttcatgcaagagcatttgggttaggggatggttggatgagaggagttgttaagtggaagaattgtgacgataaaggatcattatgtgggaagacggttgtgtgggatgtggtctgcatgtcttatttagcaatgtatgtcttttttgttatacttctgtactcattgcattcaggtgctgtttaagaagttattttggttcctttttgtctttcagatagtaggtgttcattcagtatctattgactgtgtgactatgactttcaggaacaggaatggatgatttatctttcgattctttgcattctccatagtgctcagcttggcgtaaatacagatttaatattcagtttgacagtaagtcagttagaaaaccacagcaacataatatctgccctatttaccttttaaagaaaactaaggatgctgtattagtttcttcaacactgagtgtggacttgattcattgtctctggatattcagttgccccaaaattattcaagtagtctacttggcaagtatttcaagaatggagggcattgtttagccttgtaattattcattggctcatgtaattaggagacaaacttttgctttggaataagggttacaccacacaatttgggatcattttgtgatcaggcaattgaataggctagaaagaattcctttactgatggatagacattctgaatacctgttttatccttttctattttctcatactaagaaagtaagtagcaaattcttctcacactgatattgtgaacagaaaggaactctactatttttggccatatatatgtttttttaattttggatctattatgtgttctagtgtctttagagaaaattttcgtaattgaaccttagaagagaagacaaatgctgtgtaatgtacataagaacaagaagacgttactctagctgaaaatgtcttttttccacagtactttatatcctggccaactgctcttgtgcaaggcgaccaagtaacattttcccattcagctataagaacgaagagactgttattgccactggctggtattgagtaatcgtacataggtggggtgagttgaaggcaatctgaattataaaacaccttcctttgaagtcaaatcaatttttattcttaatctgtgaacatgagatgggaacaaataacttctgagtgaaataaagatttcttagcctgtcaagatttatcttatcaggctgaagaggtgggattcctgttagcaactggcagttttaaaaatccattcgcctgaggaagtgtgaaaacagtctgcagaacaaagacactgagctattgctgcattgagtgcttatttgctccttttttacatttcctgcttgagacctcgccaggtccaactttaaaacgtttgcaggctaatgggagtgtgtgcacagggagtatcagaaatcatttccttaggggaggaggtgttttgtggtgcaaaatgttgaggttctgttgccaaaacaccaactgcaagagggtattttctgtgaacttcatgggtggctttcatagggaattctccatgtcattctctgatgtcttttattggcccttgttttgccagagtggggaaaaaaaacaaaaacaaaaacaaaaaccaccttccctgtgtcatttctcttttaacaaagaaagccaaaataattctataaatgaaagtcatgcacatgtagaactttgggtgcagctctagagtattttttttttttaaccctcctaggatgaagccaaaagaagaaaactggttgtatttctctaacatttttaggcagatgatcgtttctgggcagggggaaaatgccaaagcctgtgcagtttctctttcggctcatttgaaaatactctaggaaaagacccctgtggattctctgccccttctgtaatgtgtggaatcatgtgattgctggacagcccccttggaagcctgccagcccagcctcttcagcatccagatgggaacccggaggcgcatctcacagcggaccgttgattaacccaaggtcacctggctctggtttctgacggagcgagaatgagtacccagaggtttccagaacctcagcacaaagggtatccatgatgaacaggcatttccctatcccttctctctcctgtcccctgcataaacaatgcaaaaaacacactcccttcttggccaggacccaaagacctattatcctacacatgtctttctgtgctttgagggatcagcaggggtgccagtgaacttggattactctttggatcaccctgctgcctccagctccccctctgttttgtttcatgactcagtcatcctgtttgagctcatttaccacttgtataggggtacattccttgacttctcagagcaaaccaagcccccatccatgatttcttcttcttttacaatgagctctcatatcacatttatcccagtggaaatttcatatcaatatctgtgattctttgactgttctctctttcccctagactccaggatccttgggatcactggccttgtcatttatgttcctgcttatgtcctatagcctggcacttagtgaggcggtgtgttgtgttgggttttgtttgtttgttggttggttgttgttgttgttgtttgcaagggcccctgcaaagtatcacaaactaggtggcttaaaaaagcagacatccattctcttgctgttctggagcccaggaggctgaaatcaaggtgttagcagggacatgatccctctgaaggcattaagggtgaatccttcgttgccttttccagtttctggtagttgctggcattccctggcattctgcggcttgcagctgcgtttttgaaagctgcctcactcctaacctctgtttacattggtgtctgttcacgtcacctgtcctctatgtgtgtatctctgtgtccagattttcttccgtttgtgaaaccagcagtccttggtttagggcccaactaatggtttcatgactcctgtgttagcttcctagattgcagtaagaagtatcagaagctcagtggcctaaaactacagaaatgtgttttcttacagtgctggaggctggaaatctgaaatcggggtattagcagcgccatgcattcttcaaaggacccagggaagaattcttgctttcctctttcagcttctagtagtcgttagggatctggcggccctcagcttcgagatgtgtcactccaatctctggcttgggtatcacatagccttccctgtgtttttctctgtctccaaacttccttcttcttataaaggtattggtccccagactgggctcggtggctcatgcatataatcccagtactttgggaggctgaggcaggtggatcactttgaactcaggagttcgataccagcctgggcaacatggaaaaattccatccctacaaaaaaaaattaaaaattagctgagcacggtggcctgtgcctgtaggcccagctacttggaggctgaggttagaggatcacttaagcccaggaagtggaggttgcagtgagccaaggtcatgcaactgcactccatcctgagtgacagagtgagaccctgtctcaaaaaaaaaaaaaaaaagaaaaagaaaaaaaaaggtatcagtccctgtatttaggcctcatcttaattccatatgaactcatcttaattacatctataaagaccctatttccaaataagcccacgttctgacattctggggggccatggatttctgggggttgttatccaacccagtgtacaaggcagtacacatttattgaatgcatgaatgaatgataatgctctgggccctggcaagtctcagcctggagaactgagtctgcctgcctgcgtagaatcaagaacaacatgcacttcagtggaatttgggaagggtcagggtctgtgccgacagaaatggaaaaatcctccaagcgcctcaccctctcttaaaagactcctcaagattgctttgctgttctaccctctacagtgtttttaatatgtctatttaaatgcaaattttgactttctgtctgtaatcatataaaatgtttggcactaaaattttaatcaggaatgtaattttagatagaggcggtaatggagtggtaggccacacataacagaatgaagcttccccaacgtggattcccagactatggaagtgctggcctccctgctcccagctgagccgggaaaactctgccccactccaagaggtgcttctcaaagatgattcctgatcccaggcatgtcctgtgtcctgtcaccaatcctggtgcttcatcgtcctttaaaatccaaacgaggtgatctagtgttcttcctctgcgtcctctggtcttctagcatcctggataggccgtgtatgtttagaaagaggggctccaccctgtgcccgcctaagatgatggctcatttatcaagaccaggctggaggctcagctaccagagcttctgttgtttgggaggaaggctgccagcagcagatgtttgtcctcgcctcagctccctgcagcctttgagctccatctgccgcacactcgggcacagctgccagtgcttcccctccgtgctcacctttcacctctcacggaggctggggtttcatgcatctgggcccaacagagagatggtgacccagaccctgcgatcctggtgccacaatccttcccaacagctcgctgggcatctttctgcactagcctgtcagcatgctggaagcagcaccgatggaggttgttgagcagggttgcaattgtagcccgtcactttggtcttggtgttccatcttgttagggcaagagagtcagagcacacacagccatctcctggctggatcatctggtggagtgggagtgtgcacatgcccacccccatttctaaataagatatgcattgtctcagggcctttgcaatgtccactccctagtcctcaatgctcttccccattggtcatcccagagctcatctcaaatgtcaccctttagaggggcagctgtcagtcttcccagttaaagcatatgccaaccccctcatcactcctggtctcaacaacctctttatttccctcattgctattatcttcatctgtaattctcatctttataatatctcttgaatgaatctttaggaggattactcttcctagagtgtgcaaaacggattgcagggatggtgagaggtgggcggaaatgttggaaaggggacaagggtggaattggtagcactgatcttgttgagagaggattggccctggaaaaagaaagtagcaatggagcaggaagtaattagacatagaagagagctcttcacgtgggaggtgaggagaatcggtgttgggattgtgtgttaggactgaggaaggaggaggaggaggatgcccagctttctaaactgggtatttgagtggatgggggtgacttgccgaaaataaagaatggtttgagaagaaagatgctgtgctcatcttggaaatgttgagttttgggcccctgtagaagacccagctgagatttgcaggtctgcatcaaatggagaattcatcagagaggcaatggtactcaaaaccatgacagtgaaaggtgcttccctaggagagaggcaggataaaaaaataaggtggcccaaaattaggatggccacacatcccagttagccaggatattcctgccttatacctgttgttccaccataatttctaatggcccccgcccccctactttcactttcacttgtctcagtgaactatatcgtcaccctacccgcatgagaaggttggggaaattcagagttcataggagggcataagaacccactgaaaaaaactgagtatgagcagaagggtagaaagaaaaaccggggtagtgttgggtaatgtatgccaagggtagaaaattgacaagagaagaatcattcatgtcaaatgggtcacagaggtgaagtcatgcaagtgtcaagagctgtgcattggatttagctaccaaaaaaaaaaaaaaaaagtcttgatgaccctgtaatcatgatggtgggaatatgccagagacaggtggctttgaggagaaaatcattgatgagaaactagagacagtcagttccactaagttttgttgtgcaagaagggggatatgttagaggagtttgcagacgggcatgagagaacaagagaaggttcatgggatgggaggcatttgagcatgcgtcagtcctggaaaggggcctgatggagaaagcttcaggagagggggtgtccacatgatacagcagtgttcccaagggagagagagcagatgcaggaagggacaccttccctgttaacaggcaagaaagagcaagttggggtgtaaggaagtccgtaggctttatggcggggatttgaagagagtagcatttattttctcctctgaggtaggaggcatctgagaggtgggggaggttgaagatgggaggaaagtagacagttgctttaaatagccacatggaaaatgggagaaggaattggctcattcagatgacttttattgggtgccttctgtgctccaagccctgggaatcaactagtgaagaaaacaatccaatgggactgatgttctccttggaaagagaacagtgacggtggtggaggcagcaaagggaacactggaggctgaagacccctccccaacttataatgatgcgtctgtgagtggtgaatggtggggattttttttttttttttttttttttttttttttttttttttttttttttagtagaactcagcagcttgggtctagacacagagaaaatggacaacttatggtctagagatggcagcacagaaaggaaggtgagttgaagttctggggggaaaataaatggcaggtaaagttatggaccatttgatcaaatcctggtgtgaaataaagagcatacttaggatatgtcttttgttttttcttcttttcctctgacatgcattgctatcatgagtgtccttgaacaaatctctttgggggcatacaaaaccatttctgtaaaacaggtgttaagtataggaactctgggtccaaaggagaacacataatcaatttggataaatattgccaaattgtctgttgcacattcctcaccagtttgtgctgccttcagcagtgcccaaagcgcctccttcccttcacataccgttgccaacataggccattatctttctgagttttaccaagtggaggaacaaaccaaaggtcctcatatttttctgtgcattctggtgattgcttgtcttggcgagcatcttctttttaaaataatcttgctgggggacttgtggtatgcaatgatgactgtggaagtattttagggggcaggtcagagaggagatgcctgtcagtttggggcaaggggatttgggaagtttttggaggaaatcaaatgggagacaaaagaatttgtctgagagctggagaagaaggaatagatcctagagacattttcatttttgttgcattttatttttatagatttaagatgtgtaagtacaaatttctcatgtgcatatattgcgtagtgatgaggtctaagcatttagtgtacccatcactggaatagtaaacattgtacccaaaaggtaatttttcaaccctcacctccctcccacccttccatcttttgcgatctccagtgtctattattccaccctgtatgtcatgtgtacccattgtttagctcccagttataactagagatatgttggaagtaaaatgcaacgggcttgatgaccttgcaggaagtcagcgaggagtgatcagcgctgatagaggcttatatctttggagtttgtgtgaccatgctaacttttaaacaggaggaatgatacaaaataagatgcaggtttggggttcttttccaaggtcttgcctttacctattggatgtcaactatcttcttgggtcattgaacaggagctcttcctcttggcttgtggcacagatgagtttgcttctgtcatgacgctggggacatggggtcctgtgtgctaggccaggcattgggccgatgtatgcctggggctaccgcatctgctgctgctggaactgggtctgccctgtgtccctcgggattccagcaagtggacttcatcgcattatcatgcattcacctggtcagtttctgcacgggctgtttatagggcacgggtttaatagctgtctcccctgctgcactgcagattccacgagggcagagaccatgtccggctggtcgatcatcctctcctaggaaaaggctctgcaaagttttcctgtaaagggccacacaggaaatatttcaggccttttgggctgtgccatctctgttgctattcaactgcctttgtagcgtgaaagctgccttgatgatatgtaaacagatgggtgtggctgtgttccaataatactttatttatggatgcagaaatttgaatttcccatcattttcatgtgttgaagaatagtattcttgtgatcctttttccccaaccatttaaaattgcaagagccattttagcctgtgagccatacaaagacaggcagtgggcctgcggtctgaaagcatagtttgttggtcccgtcctaaagtttagcacagggcctgtaatggcagtaaacactcatttcatattgtggaagaaaagaaagaaggtgtgtaagttgtgtttttgtgcttgctttctcctgcagagtgggtaaaggaatggtactgaggactagtaaaatgcaaagatttggtatcggtaggtcttcatcctgctcctaatgcatagtgtgacctggagccagtttgtgcagctctttgggcctcagctgtcctatctgtgtgatgaggagaagcctagcttcattaagggatgtgaaaatgcttttaagactgggtgcagtggctcatgcctgtaatcccagaactttgggaggctgaggcgggcagatcatctgaggttaggagttctagagcagcctggtcaacctggtgaaaccccatctttactaaaaatacaaaaatcagccagatgtggtggcaggtgcctgtaatcccagctacttgggaggctgaggcaggagaattccttgaactcaggaggtggaggttgcagtgagccgagatcatgtcgctgcactccagcctgggcaacagagtgagactctgtctcaaaaaagaaaatgcttttactctcaagcccactgaaaagtgttaagttattacccaaagcaggagaagcagcacaatagaccaggaagctctaaatcctgacaagccagtatttacgctgcagccagcccagggctcagctgcagaggcagcgaaatcctaacagtgagcaggaggatttgacatctggtgcccaagaagtttgttaaggttgcccagtcacttgctgacatgtgctagcaaattctcatgctttctccaaaaaaagggtatactatgggcttcgctcccacaacattttggtaaatcttccaagaagatctggctttcttcttgttaaaggaagcatttgatggcagcctggatgaaatagatatcaaatctgagtgacattattgctgttgttaaactaaagctgaacctcttaaacttggcatcagttgactctcctctttgtcagaaaacctatgcaggatgccatgtgatctggaggacacaaaagcatgattgtgtcatttctttctgtatggagtctgtgcagtcagacagttcttttctatcttgctttcttccttgggtcaggacaagtccaattcactgaatgcaccaagccccttctagaaaaacagcacagggctggacacagtggctcatgcctgtaatgccagtattttgggaggctgaggtgggcggatcacaaggtcaggagttcgagactggcctggccaacatggtgaaaccccgtgtctactgaaaatacaaaaattagccgcgtatggtgtgtgcctataatcctacctactcgggaggctgaggcaggagaattgcatgaacccgggagacagaggttgcagtgagccaacatcgcaccactgcactccagcctgggcgacagtgcgagaatttatcttggaaaaaaaaaaagaaaagaaaaacagcacaacaaacaagaagagttcagtggttacaatcaaattttaaaccaattgtcaaagtacaagccaccactaagcagatggtgggatctggtttttgttttgttttttgaagcataatggatcctctgtggtatgggaattttaaggggaaaaaaaagagaacaatttctccttctctgcagtacatttactgctgctatcactctctttctaccctgaaatgtttctgtttcaccaccattcatctctcttgattggttttgcttttttttttttttttttcttctaagatgttgctaaatttgcttgtaaagttttgtttattcattggcgcttggttgaaaggtgctggatcattaatctaagtattcaaggttaaccatgctttatgctgaaattgcctttttatggaacagatttcaaggttttgcaagagttgagtgctacctcatttttgacatttcagcaatgaatcctgtttgaaatgtgatttgaatccaatcatcatcttatttgtggaggaagataaaaataatatacaaatattgcagtaaaattgcatttttccctgccccctgttttgcatttcaattcagctagattctgctagggtggcacccagcaatggcatccctgctttaattctatctttcattttttttccctcccagaaggcttaaacatatttcctttctatctaacataagttgtacagggcttctgaagagtgtgcattgaagaaatggagcttacacaattacttctataccttattatggaatctgagggtaaacagggctttggaggtcatctaattcgtctccttttgcaattacagaattatttctttgaaggaacaaatgaagaatctcttcttccaggcctctttgtaaatgtgtgaacaagtttataagtgcctccatctcagagtgtgtgtggatgtggctttttaattaaagaccaaggcttcaagctttgctgttttctccgatctgatatagccactgttcctagtcacatcatggagctcttggtcagcctgtgatctgggaggtttcttttctaactaacgtgtatccttcccttagaactagtctgcaggggctggtaccaggcagcctctcttaagaaacttacacccagaaactgctccatttctgtgtaaatggtagccatgtccgagtgggtgtcactcaccctatttcagcagcaccccctccctgtttgctatctacaaattatctctcccctcattaaagtttggtcttccaaagcttttcaaactctcagactctcattcactctaaaatatttacagattaaccatgttcagcctcagcatggtgtcatcatgggaagatgctctcagtgtggacaagataaagctgttaaagctggttgagccaagctttttcgtatttaaataatggaaacaggaacaggcagtatgcatagttaaggacgtaggtctgggttcgaactctgcctttgctacgtcccagctgtgcccatgacattatttaacctctcttgcctcagttttccccatctttatttttgttttattttattttattttttgagacagagtctccctcttttgcccaggctggagtgcagtgccgccatcttggctcactgcaatctcctcctcccaggatcaagtgattctcctgcctctgcctccccagtagctgggattacaggcatgcaccaccacacccggataatttttgtatttttagcagagacagggttttaccatgttggccaggctggtctcaaactcctgaccttaagtgatccacctgcctcggcctcccgatgtgctgggattacagcaagtttttcccatctttaaaatggacacaataacaaacctactttctaacactattgggagaacagaacaaggtaatgaacagaaagtgataagcacagtgactcatgcgtcacgtctacacatcgtatttagcaaaaagctaagcaagttattcccttgctgtgaattatcagattctagtaccagggagctgaaatactagtctgggggaagagtgtgccaatgagatctttgtatgggacagcttccccaacattagtgtgggaattccattaagaactcatttcttttttttctttcttttttttttttttgagatggagtcttgctctgtcgcccaggctggagtgcagtggcgcgatctcggctcactgcaagctccgcctcccgggttcacaccattctcctgcctcagcctccccagtaggtgggactacaggcgcccgccaccgcgcccggctaactttttgtatttttagtagagacggggtttcaccgtgtcactcaggatggtctcgatgtcctggcctcgtgatccgcccgtctcggcctcccaaagtgctcggattacaggcgtaagaacacatttctaagcttcacactgctgtcctgttgtcatgatgataggtcaaacttactgcagcttagtttgggcgggacattttggctgggaacaccaatacccgtaaaggtcatgtttacattcttgtgtgagcctttctttaaccactgagtgtattttctatcatgattatcatccacttcttgctgtgtattggcatgagggagtctttgtcctcctccatttgttcatccaaaaattactgaatagctaattaaccccgatgctggggatacaccaaacatgattcctgcaccttttcgagcttatatttggtggaaaggatagaaaaagcagcaacaaccaataaatggaaaaataaataaagccatcacaggtggtaagatgtctgtaaaagaaaccattgcgtcccaaagagagaaaagaagttcttttagtatctccagttgttaaaatagtgtctgacacatagtaggaactcaagtgattattcactgagtaaatgtttacggtaaatggaatagtttaggtaggggaatccacaaagattctctggggatctactatttcagcagaaatataaagaattattcatgagatgatcaaggggccagatagggctgggaggaagggaagtatgggtggtgagaaaggcggagagctggaaagatattggattgtttgaggaattgtggaataaagaatctctatggttgaaaaataaagagagaggtgttggggtagttattgattccgcaaagatgaagctcagagagtacccaggaacatgactggggtcataggttctggagaggaacttggactttaattgaaatgcaaggggaaatgactaaagtcttggtaaagtcaaagtccattggcaaccattcaatgaacttcaaatccatgccttttagggttggtgaccctgaaggatgaagcgttggccttgagaataaggcagttcttgtaagttcaaccactggctttcacttacagccttcatcacatcactcacctcctgtaagcatccgtagccttcattttcaatggagaaaaaagaagttgagatgcatttctccccattgctattttggaatccactcagagcactcagcgcctgctgttgttctcattggaatcttgctgtcccatgcaacttgacttctatttacactcctcggattcgtatgtgcaagtcttgcttgtgagggaagagccaccctagatatgaaaggacttgattaggaaaaaaaaaaaaaaaccttttgaagagagaggtgtaaaaaaaatgaagccattagcgtcaacttaaattcaagatatttgggatgatacatctgcttataggctcataaaacaggcaccagctcaaggttatgtgaaacaaagaaaatgtctagcattgctcagctgttttaggctacctaattatatttttagctttatgcacttgggattctcttttcttttttatttgttttgagggtgtatagtgggcacctgtcaattctgcagcccagaatccatgcccctacttctctaagagtgtccatttttccctctggtgatcattcctccccattctcagaccttttgacttccaggagagcttcgtctgtctcagtctacagggaacaagtgtgtggcttccacctggctctgagaagcactgtgtaccccagtcactatgactgttgaaaggtgagcatgcgcacctatcagaaccagtgacatgaagtttgtggaacattttttttttttttttttttttttggagacagagtcttgcttttggccaggctggagtgcactggaacgatttgagctcactgcaacctctgcctctcgggttcaagcgattcttctgcctcagcctcccgagtagctgggactacaggtgcatgctaattttttgtatttttagtagagatggagtttcaccttgttaaccaggatggtcttgaactcctgaccttgtgatccaccaacctcggcctcccaaagttctgggattacaggtgtgagccaccgtgcttggtcctgtctgtggaatttttaaaatgtgtttgaacttgggggacgtaggtctgaagctgtttgcagccattttggcaccatgtggagcgtaggaatgaaactcacactcacagaaagtgtgaagaagagcagaaagaaagaaatgaagaccaaggttcaatggcaccatttaatggtgatttaaaacatgtgtttgtttttatttttacttattatttattatttttaattaatttgtcttttagttgacaaataaaaattgtgtatatttgtcgtgtgatatatatatatataatggaatactactcagccttaaaaagaaggaaacctggctgggcacagtggttcccaccagtaacctcagcactttggtaggctgaggtgggagaattgcttgaacctaggagtttgaggctgcagggagctatgattgtgtcactgccttctagcttggatgacagagcgagatgctgtttcaaaaacaaaaacaaacaaaaaggaaattccatcacttgtggcaatatggaagaacctggaggacattcggctaaataaactaagccaggcacaaacatacaaatacaccatctcagtaatatgtggaatctaaaaaaagttgaactcacagaagcagagagtagaatggcggtttccaggggctgacaggtggagatggagagttcaggagatgttggacaatgacatcacttgaaaggtccctggatccagctaagccttaacccttttatccctctaactactgagttacctaaactagtaaattccctttttttagtcttttcacccagcttggctttgcacttttgccagctgcaaccagcaaagttcacactgtggcaggggtgctcatcagtacgttcagttcatgaggaggactcagatgatgcatgctgcagggattcagagggagaatttcttttctccttcatagagcccatttttctgtgtctgtgggcacaagttgggaaaggagagaataatgaaacgacatgcacagatgcatacaggactctgcagagatggtgcaggcattgtcaagatgacctgcccaccactagcttacatatccttcatttttttgtgtgtgtttctttcaacactcttcgatcatgaaactacatcttttattttccttgacagtgctcaagaaaatgtggtcattaagtttatcatcatgaaagcaggcacctggtttctgaaatactagacttcttcatgtgtatcatctctgtggtttttcagaactctaaaatgaaggtccacttagtccaattgctgttctaggaacctgtgatcttttaatcttggatgtctctacctaaactatggtgtgagggtggtgtactaacaagcaactgaagttgaatgacaagagtaaacatgaggtaggtttttctcagtgctaatcaatgacgaacctcgtgctcaaaaattcagctcaggctgtagccaccaaataaatcatgggccagagaggttcagggactcaaagacatgaggctgtacccaggagaaatcaagctatggactggtaaggctcagaataaaaattgatgctgtcttcccagtatttgggataataggattgtacctctttgagctacttatgtgtactgccatctgagtcgctgtctcagcatttccagcagaaatgcaacagggctggtgaagtgtccaggagtgaatgacttgtaagccattaggaaggccggggaaactgtgtttgggctaaattgcttttggtcaggagctccatcttctcatggctgtgaaatgacggatacctgagagaagtcccagctgaaagccgtgtctgcactgttgttttctaagtggatgctaatccgttaattagaaggtttgcagttatccttggcactgtatgcgtgcatacattagtatttctatttatgcacatgcaatggatgtatttacatatccgtaaacctgagtctttttacctacctcttagaggtgccattctgattattttctggtttagagatggaaagacaaaatctgcccctccccacccccaaatcctgaacttgagtggagctgtggtgataatactgaactgaagggctgtgcaggtacctagtgttttactttgtgccaattatttgttaatgcaggtatcaattttttaaaaaatgttttggatgacttcagtgtgccgggcactgtgtttgtttctgggaataaaatagagaacaaaaaacagagaaggtgtcagcccttttgcaacttataatttagggagggagtgagaaaaaaaaaagcatggaagaaacatatcagatagttatgatttaaattaaataaaataaactatgaattaaaattagttgatgcgacagtatatggctaggtgagtctctaagcttaggttataaatgatgacttttacaaagagactacccttaagttgaaatctgtattataagtagggagcacctataaatatcggggcagggggttagttttgagcaggtggatcaattagtgcaaaggtcctggggcaggaaggaggctggagtggtttgggaaccaagaaagagccgggccagggttgcattttagtggatgatagggaaggcagcatggaatgaagtggagacgggcttgtggggccgggtttctcaacctcagcactactgacattcgaagctggagaatgctctttggtgagggctgtcctgtgtatagtaagatgttcagcagcctctctggcctctacccactagacgatagtacctcgcactcctccagttgtgacaataaaaatgtctccagacatttgccaaatgtcccctccaaatgtgacaaaatctcccttggttgaaaaaccactgaaattggccttgcctgcaagaagtttgagtttattctaggatccatggaaagccactgaaagtttgaaccaattaagtatcacgatttgggccaggcacggtggctcacgcctgtaatcccagcactttgggaggcccaggcgggccgatcacgaggtcaggagatccagaccatcctggctaacacggtgaaaccccgtctctactaaaaatacaaaaaaattagccaggcatggcggcgggcacctgtagtcccagctactggggaggctgaggcaggagaatgacgtgaacccgggaggtggagcttgcagtgagccgagatcgcaccactgcactccagcctgggcaacagaacaagactccgtctcaaaaaaaaaaaaaaagaaaaaaaagtatcatgatttgattcacatttttaaagatcattctatttgctgtaagcaaatgggttgcaggaaggcaatgtggaaaggaaaaaagttcatggtcccagagagaggttataattgccttgatggaaggtgatagtcatgggaagaaagttctgtaggcagatatgatttggataaagttgacagaatttatttgtggaccagatggatgggcagggagagaaggagaagattaagtacaattcttagatttttaaataacaaataggatacccctcccatcctcgaagagctcacactgaagtaagggaaaacaaacatatatattgcactcattacagtgtgctctaataaatgcatgaacaaaatgtttcggcagcgctgaggagagagtgaataagtctttcagagaaagtcagggaagattgctcagaggctgtaaaagcttttgaagaataagtaggatttttctaagtggagaaggagctcaggttcctggtctatactaagaggaaaccgtaggagataatccctcttcaataattcaaactgctgtcaaggaaaattatgcccagagtgactctgttctatggcctgggagggaaactggggtgaatgtcctaaattgttgtctttgaaaagaccgtttctaaaattcgtggcccaacgtagccttttactggttaactctaagtatttaagatgttctccaagcgttttaactgaagacactgcgtcttattttgtcttcattgaatttcgaagaagcatctgtagtaagaatatttacacggtttttctaggtaattgtttgtctcctggaccatagagtaccttaaatacgttacattatataatttactaatagtaatacaattttatgaagatatctagaggtaacaaattcaagattatgtatttctatctctggaataataattactgttttcatttgtaaaagagattgtaagggaaataaaatgtaaagttaaagctaaatgtcattgtattctatgcttgctgtaaggtcaaaatatgtgatcctgatggaatatggtaatatccctttgctctcctccgcacactgaggaaccttttcctgggactaatagacccccctaatgggatgcagacagtgcctcagagtagatgttgttccataaatatctgggggcactccagattgggaccttgagaactagatggtatgctaaattccctccttcctttgcaggaattaaaaagcatccctcaaattgacaagaaaattggataataaattaaccatttacagtttggtaaatatatgcacaactgaagttccacgtcatgggccatatttttatcagacgcaacaccagatgaaggataaaccatatgacccaccctcttctgccatgaatgaacaatggactgaagtctttcataattgcttgtttcaagatgctcactaaatcagacaaggaactcctgtcttgtgtctttaagggaggttgaacaataggctgggacactggagtaaatggggcactctgccatacttacactttcctttgaaatttgtgtttgggaggctttaactatgagtatattttgcagccaaatgcagttagctttttgactaatggagctggtgtgaattttacccctccatctgtagatgctgaaatgtcacattatttcatttttctaaaacaaattaaatgactctgagcatccagtcattagggttttaagaaactcaatcacaactatgagtatagggaatggggatgaacagtatccctttcccatatgctagatagacagtcacctgtggagcttagcagtgcttcggatacagggaaggacagctggtctttgagatattgtgggcatttgggtgttaggattcttattacttaaacctgcccagtccctataaaaagggaccgctttgcaaattctgatccatgcatggaacaggaaatctttcttaatatttagctgcttcatgcattcaaatccttgaagaccccccacatgccctgcacccttctcagttccctttcaatcttggggtatctcccctttctgagaattcactgctgttgctgacctcctcccactcatttccttccatcttctcttactttcttaataccccacattatctctgctgactgtgtctttagacacacaacacttttctttaaggaaaggcaaggctgtgtgttccttacctcatcatgttatgttagaggtccaaatgttttatgggtgaccaattaattcatcatgtcatctggatgactgttgaaagcaaaagcgggatcattgtaagaactgtgtcaggaaaccagcaaaaccagccctgtcccaggcaaactgggaattatgatctctctctggaaggaaagaagaagaaaagtgggagaggtaggctgttctttttccaacaagaatcttggaaggcgttttcattttggaaactgtttagaagactatactaaattgttactccttattaccaacatgcatagcatcctgcaatgcagacatccatgactgtgcatctccactgcttcaaacagggcactagtgttccaagctttgtgtttctattgccagccctgaatgcaaaaatatgggatcctgagttcaaatcgggctcagaagttgacatattgtttgaccttgagcaatctgcttaatttcatagtgtttgtttgctcatctgaaaacaaaagggataatgctgatcgaggcatattgtggagattaattagtttctgaagtgctgagatccacagatgaaaggctttaagtggaaattattttgtttttaaaggaataatcgatgcatgtgaataaaagagaactaactgaactgaattacaggcacttggctgctggtgggagtgggggaagaaagaatattgcttcttgcaaagaaccttaaatttaccccccagaatagcagtgggaaaattgctttttttttgtgattctgaaaggatgagaaattatgcaaaagaaacgagctagaataagaggagaatatatgcagttaagacatatttcaaagtaactttcctggataaacaactaggtatctaatatatatattatgtgtattagatatatatatgatatatatgatatattaatgtattagataatgtgtgtgtgtgtaagtatgtatatactccaccagtcctctgtgattaggttcttagccaaatgcttgtctaccaaaacagctcagccacgatccccaaggagccttaatgacccctaagtccttggtgaaaagatcagtttgggaaggagaaactaactgtttaaaaatctcacagctgtgtatcgtggtgagaaaactagcactattaagcgtgttactgtttaaaaccacttttgctcttgttacatttggtcttctctccaataaatattattattgcccttgatgtacagataggaaaatgataatcagggaaattaaatggctggccaatggccatttgtttggttaggtggtataggcaatattctgacctcaacattatgactcacaagactctgaccatgtcactgtcaccgaagggtttgctaaagatatggtgacattcagctggcatgtggaaatgaattattgtctaaggactacagaagaattggaatgaagacaggattttttttgtcaaagaaaataaaaagttctgaccattaaacgaatgcgtttttgtcatagacgtggtggaaaatgccaacaaagtcagatttcaaaattggctcaaagtctcctgagtcaaatgaaaactctgtcaaagccatgttatacttcttcttagtcttttatccatgcattttaataatatagttatggtcatgttatcccaaattcttttcaaatgttgttttaatggctctgtaactttctaccttgtgactattgcatggttgttttgacctttttctcattttttgtagatatttaagttcttactttttttttacttttataattagctctgtaatgagctttttgtgtgaaaaaacatataattatatacagagttattaccttactacagattcataacatttggattattgcatcttgggaaataaatattgtagtgttccttgtgtatatatcaagtttatatcaataccatctatatacttatatatcagattttataaattaaatgtgcaatttattgtgtaccaaatatatttcaataaagctgttttttaacatgagggccttgcacagtagctcacgcttgtaatcccagcagttttgggaggctgaggcaggtggattgcctgagctcaggagttcatgagcagcctgggcaacacagtgaaaccccgtctctgctaaaatacaaaaaattagctggtcatggtggcgtgcacctgtagtcccagctacttgggaggctgaggcagtagaattacttgaatccgggaggtggaagttgcagtgagctgagatcgcaccaatgcactgcagcctgggtgacagagcaagactccttctcaaaaaaaaaaaaaaaaaaaaaaggacaactaacacctttactcttatggcagtaacagagtagcttgttttggagtaatcctatcatagatagcaattataaattctagataggatagtaaaaatcaccttctgtttgatggtactccccaacaaccataagtaggcagaaattgaaggggctttgaccctggaaagagaggtactgtaacttgataaaatgagatgcatttgatattcacccccaaagtacacaccaatccatgtggtgcaaggaagacgagactcaggaaggctacagtcttactgagtttgagaaataaaagacagatgtccagaatagttagaaagtatcaatgaaagacacatagatagactaggaaggaagatgcagatttacctataaaatctacacacattctggtggatctctgaagcatatttatataaaagaggctctaggggagcccgtgggaagccatagctggacgactgaaagaaccgagtggatactcgagttgctaaacaggtagaggatgcagaatgggagtgtgaatccagcaagttaactgcctgctataacaaaaatcagcactcttctgagtaagttaacaaaattcagcctcattaatatattatccatgatgtccttttaaataaaacttactagatgtgtgaagaaacagagaaacattactcatagtcatgagaagaagcagttaaccctgacataaaaaaaatgttggaattaacagataaggactttgaaacagctggtataaatgtgaatagtaattaaagaaataactagttatataaaaatgaaaattttagaattacaaataaaatatttgaaatgacagttttactatatgggctaaacaggagaatggggacagcacaacagatcagtgaatttaatatagattaatgtatatcattcaatttgaaaaaaagcaaatgatttgattattaacagaagactagtgatttatgggataatatcaaatgtatacagctataggtacttggagtcccagaaagaggaaggagaagataatgcataagtaatagttgaaatttcttcaaatttggtgaaatactttcaagaagctcaagaaacttcaagcaagcaaaatataaagacaagcacacctagtatgattttaatttccacgtcatagtcacagtgatgaaaataaaagataaaaacatcttgaaaacaatcagagtgaaaaagaggcatttcctacatggggcatagtgatatccgtgatggtcagcttctcatcagaaacagtggaagcaagaagacaatataatgacgtcttttaatggttgacaaagaaatctgcccacccagaattctgttttcataaaaaaaaaatccttcacagaaattaataggaagatgcattcagacaaatgaaaatagatgttttattaccattagtcctgtactataagaactgtagctttaaagggtatcttcagagtgaaaggaaatgatgctaggtgagacttaaagagatgaatgaagagcagggaacatggtaaatatgtggataatataaaaggttataatgcttctttgaaaatatatgtaactgtgtaaagaaagatgacatcactgttttttggagtttgtaacatatgcagacacaaatgatgagaatgtgaagcaaaactatactgttgaaaattttttacacttgccatgaagtagcactgtattaatgctgagtagactgtgctgtgttaagattacatagttaattctgagagcaactactaaaaatattacaaaagtgtatagtgagaaagatacggaaggaactaaaatgaaataatagatatatcacttaacccaaaatgagactgaaaaaggggaatagagaaacaacggcataacaaaaacaatagtaacaaaaagcaaacagaaattaaagagcaaaccataaacataagtccaactatgtcaggaaacttacaattatggcagaagggtaagcaaacacgtccttcttcacgtggtagcaggaaagagaagtgctgaagaaaggagcaaagccccttagaaaaccatcagatctcatgagaactcaccatcatgagaacagcatcagggtcaccgcccccatggttcaattacttcccaccgggtttctcccataacatatgcggattatgggaactacaactcgagatttcggtatagccaaagcatatcattctgctcctggtcctttccaaatctcatgtcctcacatttaaaaacacaattattccttttcaacagtcccccaaagtcttaacttcttccaccattaacccaaaagtccaagtcaaaagtctcatctgagacaaagtaactctgttctgcctatgagcctgtaaaatcaaaagcaagttaggtacctactagatacaatggggtacaggcatcggataaatacactcattccaaatgagggaaatttgccaaaacaaagggactacaggtcccatgtgagtccaaaatccattagggcagtctttaaacattaaagttcccaaatgagctcctttgactccatgtctcacttcctggtcatggtgatgcaagaagtgggcccccatggccttgggcagctctgcccctatgcctttgtggggcacagccacctttccacctgctttcatgggctggcattgagtgtctgcagcttttccaggtgcacagtccaggctgtcgctagatctaccatgctaccattctgggatctggaggatagtggtcctcttctcatagcttcactaggcggtgctccagtgggactctgtctgggggctccagccccacatttcccttctgcactgtcctagcagaggttctccatgaggattctgccccagtagcagacttttgcccggatatctgggcatttccacacatcctctgaaatctaggcgaaggttcccaaacctcaatgcttgtcttctgtgcacccacaggagcaataccacgtgaaagctgccaaggcttggggcttgcaccctctgaagcaatggcctgagctgtaccttggcctcttttaaccatggctggagctgaagcagctgggatgcaggggaccatgtcccgaggcagcacagagcagggtggccctgggcctggcccatgaaaccacttttccctcctaggcctctggtcctgtgatgggaggggctgccatgaaggtgtctaacatgccctggaaacattttccccattgtcttggtaattgacattcagctccttgttacttatgcggatttcttccaccagatatgcgaaatcatgtctctcaaggtcaaagttccactgatctctagggcaggagcaaaatgccaccagactctctgctaaaacacagcaagagtgagctttgctccagttcccaagaagttcctcatctccatctgagaccacctcagccaggacttcattgtccatttcaccatcagcattcaacaagtctctaggaagttccaaactttgccacatctttctgtcttcttgtgagccctccaaactgttccaacctctgcctgttacccagttccaaagtcacttccacatttttgggtatctttacagcagtgcactccactacctcaataacagcttatgtattagttcattctcaagctgctatgaagaaatacctgagactcggtgatttataaagaaaagaggtttaattgaatcacagttccacatggctaaggaggcctcaggaaagttacagtcatcatggaagacacctcttcacagggcagcaggagagagaatgagtgcccaatgaagggagaagccctttgtaaaacccccagatctcgtgagaactcacccactatcacgagtacagcatgagggtagccagccccacaattcaatgacctcctgtcaggtccctcccacaacatgtgaggattatgagaactgcaattcaagatgaaatttgggtggggacacagccaaatcatatcaggtgatttgaacaacactatctaccaacttgacctatgacatttatagaataatgtatccaacaactacagcatgcacatgttttcaagtgctcatgaaatatcccctcaaagtagactacatgttgggtatgaaatcttaatgcatttaaatttttgaaatattgttaactatgttttctggcaacaatggaataaaattaggagtcagtaattataacgtacctataaaagtaccaaaattttggaaattaaatagaatacttctaaatgactctcacattaatgcagatatcacaagagaaattagaaagtattttggactgaatgatgatatctcaaggcttatgggatccggctaaaaaacagagtgaatgtatagctatagatgctgtaaatttactggttgaaatgttagagagatttaaagtgaataatccaagtttctcctttaaaactagaaaaaaagaaaattatacccaatatagtaaaaggatgggaatagtaaatataaaaacagaaatcaggctgggccttgtagctcatgcctgtaatcccagcactgtgggaggctgaggcgggcaagttacttgaaatcaagagtgatttcaagtgaaatcacttcaaatctggccaacacggtgaaaccctgtctctacaaaaaattcagaagttaaccaggcttggtgggcgcttgtagtcccagctactcaggaggctgaggtgggagaatcacgtgaacccaggaggcagaggttgcagtgagctgagattgtgccactgcattccagtgaaagagcaagactctgtctcaaacatacacacaaaatcagcattgatagtacctgatggtgttggattgaaattggagctatcagtatcaatttagtttttttaaagtatatacataattatagaaatacacaaaacttggaaactccaggagtaatcagcacaactagctcccagatcttggtttctaaatatcattaatcattaaaaggaaccaaaacttattggagaaagggtgattccagaactggggcaaggaaagaacaatatgaacctggaacaactctttctttttgccagaaagtcaggaatatcaaagaatgatgggagcatgtccaaaggacacaggcctcagcttcaagtaccatccactggccagatctgggataatctgagtatcaaaatgtaaataatagcaagagattggagctcactgaatgaaaggcaaatgcataagtgtacactgatataaataaattagaaaatgaaaaattcttcctcacaatataaacactactactaacttataagcataactcacacctgtgaaaatgagttagggtaacttcacttatgataacctcaccaacattggactgtgatcattttaaaacctacgctaatttgaagggcatgaaatgatcttttatttggatttataggactttggatcattaggggacagcagtgtttagccgtatgcttataatgtgtctttaactaaaatatgatcatttttcagtcattttgtagctttcatttacccataccccatttcaaatcccttgtataatggaagccactattgctgttcccagagtgactccattgttcttagacgcagagaacgaaggaagaaatcaaagtttaaagataagtttactgttcatggaaaacattaaatgataaactatagtttatttaaaatagaaaatgattatttcttgggcagctattgcatttatgggatccattttatatgtatctagtaaatccatcaataaccctgtgatggagtaattagagaagagaaattgctattgtttccactttaatgatgagagaagaaaatacccagggagattaagatcgtaactgatcatcatggctgagccagaccagctaactgtcgaaacgttcctctggccccaaccgtgatacctttgtctaatggtggggccagggagaagggtcagaaggatgagatgactggggagaagaaaacagaaaaaaaaaaaaaagcattttcttgtgagtcctgtcccaaaaaaatgctaagcatgcatgcagacacccattcattttatacattttgcttgagtccctgcagtgtaccaagagctaaactaggcatataggaatgaccctgacattcatccccacccactggtctctggggtagaataaacttcggaagcttcctatgtagaggcgaccatagtagagaactgaaatctcaccctttgttataggaggataagagaaaataaacgtggatatttaggtgtgttcttttccaaacaaaataaaaatgaacaaacacatttgcttgcttttttttcctttggatcttttatcttttaatgcactttcattggaattcaatccatacatactgaagggtggttgaagtaataaatacagtctttttctccaaatggtacccaaatgaaagcaaagtactgctttctgcttaagagtgttcagtttgtccttgacctatacatttacactgggttgctgtcctctgcctccttccactactgtccacacaatacctatgtaaacacatacacacacacaggccttaatgatgagtaaggcccatttatttagaaaacatggtttgaaggatatgttaaaatcatttgtagataaattgatatttttatattattacttctttcttgggtttctgcctttgatttagactgtagccagttgtgcctgctatcagttctggaacctaaaattcatgtgggaagaatttaagtgtaaccgagatgtaattgtgattgaagcagggaatgaaatataaacactaatcaaagcttcagtagacatgttttttttgtggattaatacatcacattttaaaaccttcaacccttggcttctcagttttttctgtttattgttttgtttgttgatgtatttgtttaattcatgggttagaggcttgggtgctgagagagtcgattgtgttaaaacctttagtgtggaggtcatgaagaggactgagaatgtttgatctttcactgtgggtgctgaaccagcagcatgagtatcacctgggagattgttagaactacagacttgcaggcctgtattcaaaatctgcattttaaaccaagatactcaggtaatttgtaaacaaaagtttgagaagcactaggtcagtttactccagctgtctaaaccagacctgccactcaggtgttaagaacccaagcaataaggggtggcttgcttttgataatctccctctaatcttatcagagactttttttttaaatagaggattctactcccatcatccaggcaggagtgcagtggtgtgaccaccactcattgcagcctggaccaccggagctcaggtgggcctccctcctgaacctccccagtagctgggactacaggcgagtgccactacagttgcctaattttttaattatctgtagagatgtggtctcactatgctgatctcaaactcctgggctcatgggatcctcctgtcttgacctcccaaaatgctggggttgtagccatgagccaccgtgcctgacatcagagacacttctgatgagcccaatatatttctaattattggaccctcaagtgcatctggagaggacaccgaaggactgtggaggcatcgagccctatgttcatgcattgactcaagtgtgtccctccaaaatccatgtatggaaaccctacccctgagaattactatatttgaagattgggcttttagaagataattaaggtccaatgagattataagggtggggtcctgattcaataggactggtggcattataagaagaggaagagacacagtaggaaggtggctgtctgtaagccaggaaaagagctctcaccagaatccaaccatgctggcactccaatatcaaacttccagcctccagaaatctgagagtgtaaatttatgttgtttaactcacctagcctatacagctggctctccatgtccatggactcggcatccatggagtcaaccaaccacagatcgaaaaaatatatattttaaattgcatctatactgaacatgagcagattttttcttgtctttattcactaaacaatacagtataaaaatttatttgcatagcatttgcatttgtattaagttttacaagtaatgtagagatgatttaaagtatatgggaggatgtctgaaagttgtatgcaaattccatgccatttgctgtcagggacttgagcatctgtggattttggtatctgtggagggtcttagaaccaatttctgtggctactgagggaccactgtagtatttgtgatggtagtccaggtactcaaggagagttcagttacaaatgcaattttcccctaaagtaacttggttccaaaagagtacgcatttgtagttgtatactacaaatggagtgcgtgtgtgttctctactctaatatttcatgccagagtgagttattagtttttgatcctttttcttctttttccttcatgagcagcagtcctagtttgcttgggacggggaggttttcatggacgcatcatcccttcagtgctagaacagggagagtaccaggcaaacttgggtggttggtcaccttttgctgttcccagattctttcctgagctgaagatctcagctcccttatgagaacttcacattgcttcaaagaagagcagatctcatcagaatccagcaatgacatgaagcattttggtgcagagtaactaccagattagagctcctggaatacttaaaccttcgtggatccccgatatggaaggaagaagcctggctatcctagcttgaatggaattcagcattggtagacggaaccacaaatgccttctatttcttcccaaatatccttttagaacttcgaactaattctagatagagtcttaaggtcaggtataaatgaactgctaagtatttatgcctgcataacacaatgatcaagaggcttcctgtgagcccaacattctcatgctttaatagaaaacttattgtaaaatttgcactctactctataacatagaaatgtctatcatttctataaatactatgcagtctcttctgatatatctgttatcctatcatacaagagcagatggctgggattttatcacagttagagggtgttttgagatgggctgcaaatcctctggagaatttgatttggagactcaattagtcatgacaagttaggttatgctgcagtaacaagttggctcctgaatctcaatagcttcataaaacaaagctttcatatgtccagtgttgggcattgggaagtgcaccaaatagtgcctcagggactcaggctatggaggcttcaccatcccaccaccgtatcatctggacacacaacttcctttgtcagcatgatgggaaagaaaacatggagaattgtacaccagctgatccatgcttaggcctgcaagtgaaactccttggtcagaactagtgaaatggccccacctaacaaggtggaatgagaatgctgctcttctgtagccataaagggaaggaatagcaaaaatgaaagtgaataggcataatatctaacacaagggtccaagaggtagaccctatacatgacaaactgtaattccacagaacagctggagtcattgatttgggaactagccactttacacatgggctatttttacatttgtttcaaggagtagtggcagggatgtattatttaataatgatcaataaaactcataaaatattgagggagaaaacaacttctattacaaaatgcaatggtttaacctcctttccacagaataaaattgcaagtgcatgagaattatcacatatgtccaaggatacacatattcctaccttggatgctcacatactgtgtgcaggaaggtgagaacgcagaggaattaaggactcagaacttgtctcctctcattaacagccaatgtctcacatatgtcctggtggatcttacagggctcagcctgaatgcttctctaaacttttccacatgtagtaaggctaaagaccatgtgttttacaagatggcaacactcaatcctatgcttttcactgaaacagaatgctctgtcattgaagcatttctctggggacctcagattctctttacagaggcaatacccattaattctaatgcagcctcctgtcatctgggactcatgaacttccaccgcagtggtcccttcctataatcaaactgtagtagcttctgtctccatagaagatgttagacatgcccagaaacctggtatgcaatgtcacactctgccaaaagaacataaaacttagacaaatatggaagtcattaacactgaagagttctttgctattaaaaataggaaaattttattactttcctacatgagaagaatatataatacctttagggttatttggtcatttggaggctagcttcttttctctgtttgtagacctatttttggaagtcgaacattttttttttttttcattttaagcaccctattgatacttggcatctctgcagtaatagaattttgaagagttcatcctgttcctatgctcggtcaatttttggataagtctgaaaatgatgctgtggatagaggatgctgggacccccatcatggcaagcatgcatcattgcaaagggtcttcataaggttatgtggaggctacctggggtcaggatccattcagagctggaaaacttaaatagaccaactgatgttagaaatagaatagatccatggcttgaaatgaacagttgtgtgtttatatgctggctgacccccctactgactgtgtgactacggaaaaaacaaaactctgctgcccatcggtaaaatgggattatgatccttgcctaacttcctgtttatagggttctggaggtcccaatgagataaactcttttgaaagaggtttggaaaatgatgcattatttcacaacaacatggtgttacggttgaatatcaatgatagagagtaattgagatggctatgtaacatagtggccagtcatccatttgcctagcaaccatctatattatttgtatctgtatctatctatatgtctatatgtctatacatctataactatatttatatacctacatccttatctgtatctgtacctttatctatatatatgctatggatttgcctatgtccaagtctatatccatatcaaatatgtacatatacattttctatatatgtaatccatttctatctctatatgtctatgtatatatctatatctatatctttacctatacctatatgtatatatttgtctttgtgtgtatctatgcttatatactatctctatatttatttttatgtatatctatgtctgtatttatacacacacacatatatatagagagaggcagagacagagagaaagagaggagaaagagggaaggagaggggtgtgtgtgtgtgtgtgtgtgtgtgtgacagagagagagagagagagagagagaagtacattctatcctaggaaatgggaacagagccataatcaaggcagcatggttttgacttatagttcccaggagagactttcattaaacaaaaatatcttgaatgaattgcaattgtggtaagtgctatgaaggaaaagtacccaatcacagtataaatcttatcccagcagggaccatcagggaacacaaaagaaataaaacactaaatcaccaatcctcacgcagcatacatggaccgtaggtgtggaccccagcctttgtgagtagatccccactatgttctgaatgttcgcttttccccagaattcatatgttgaagcctgattctcagcacaatagtattaagagctggaggctttaggaggtgattaggccatgagggtagacctctcagtaatggggtttgtgcttttatcaaagaggccagaggaagcttgtttacccctcccatcatttgaggacacacagaaggcaccatctataagaaatgggccttcactggacgtcaaatctgtcgacaccttgatcttggacttccctgcctccagaactgtgagacatgcatttctgttgttaataagccactgtgtctaaggtattttgttatcacagctcaggcagacaaagacattccctaaaagaaaagcactttattctataaagtgctgttgtttgagcttaataaaaagttaaaaaggccctttacagaggtctgtcttaaggaataaggtgtgtgtgcaggggggactttaattaccagtgggatgtatttaatgtatgatttcatttagaatccgggagccaatggttagtgttttttaatagactgaaattttcatcagggcgagttctggatctttatgcagctggtgctcagctcatctttgacctgcctgggtccttttctcacccattccatggtgggaagcagacactttgacttttcagagcgttattgatggaacaaatgtagtttgaatgagcttattagagtgtctatgaagtgtcctctgttcttaggcaacaaggccagtttctctcctcttccctccctctctgacaccgtagtgttatgttgtctgtaacatgttttgttacggttttagcaagttttcaaggcaaagggcatggcattaggaaaattgaattcacaggtcaaacaacaagtcaggtgacctcaggaaaatgacagtgatttgtgtttgcattttaatttaattcagtcctaaaaatgacccatcttgctgctattttctgtgatcacaacttttatgttttcttgtagctagctcttcatgtaattaatcattgcatgaatttctattttatcattttcttttggtgtcgttttaccaccccttctgtgatctccctgaaggtagaaaacttttctgttttgttcatcaatgcatacttaaagcctaacacatatttgacattttataaatatctgtgacttgaataaatgaataaattcacagtctctccctacatactacttcaaatactaatgttttataacaaataaaagtttactgtctggacgtggtggctcactgtaatcccagcattgtgggaggccaaggcaggtggatcacctgaggtcaggagtttgagaccagtctggccaatatagtgaaaccccatctctactaaaaatacaaaaattagctgggcatggtggtgcgcaccggtaatcccagttactcagggggctgaggcaggagaatcgcttgaacctgggaggcggatgttgcagtgagccgagatcatgccattgccctccagccagggcaacgggagcgaaacccggtctcaaaacaaaacaaaacaaataaaactttaccaaacactttgaaactggaaaaccttaaagttgttttccatttgaaagttaagatgcctttgagtgttaattacatgagtctgttcaattgtatgttttttgataatatacctccatgaaaagttgtgggatttttttaagctaagacacatgatttaaaataccctgtgaaacttttaaaaaggaaagaacctgaatgaacaaaataatatggtccccaaatggctgttgtagtggaggggaaaaaggtttcggctaaaatttatccagctgcaaaccactgtcttaagccagcaagaaatttatattcttccgaagctgagggaaaatcaaaatccacaagtgactcttctcttcccctagctgcttcatacactgctcagtttccggagatctgagataatcattttgtccttgagagtctcgtggctgtgctcttggagggtttgggtttaaaatcttaggatttgatcctgttcagaaaaacaaggcaggagcacccgagaagcatctaaaatcagccactgccagaggctgcttgctttacctgtcttgcctgttcaatttgtcctctacgaggcaaaggtgagactaggagccctgcttctgggaaaatgcctctgttaaagaaccatctcacattcctggagtttgttttgggatcacaaaattggcaactttcttttcttcttcattgcagtttagagttttaagcatcataaggctgtgtgtgtgtgtgtgtgtgtgtgtgtgtgtgtgtgctggtgcatatgaatgtgcttttacaggtacaagaaaataaataatccaaaggtagccttctccttggggtgtcctgctgaaacgatgacctagggttcttttttttttttttttttttttgagacagagtcttgctctgttgcccaggctggagggagggcagtggcgcgaacttgactcactgcaagctccaccttctgggttcaggccattctcctgcctcagcctcccgagtagctgggactacaggcgcctgccacaatgcacggctaattttttgtatttttagtagagacggggtttcaccgtgttagccaggatggtctggatctcctgacctcatgatccacccgcctctgcctcccaaagtgctgggattacaggtgtgagccaccgcgcaccttctatttgaggccctgcgctaggaggactgcattaagaccaaggcgtgcggaagcacactgatgttgctgcctctggtgggtgcacgttgaatcacgtgtgtctatccaagaggaatttgtattaacttctagtgcatttggccagaaaatgccatgagaatcagtggaacatgctgtgtaggctgttggagtggaaacaaacctacctggaagtaggcactgtggtctgcaccattcggcataagtcacttagcccctctgagcttcaggtttctcagcgcacagttggggataaaaaggaacatattactcagcatttgtgggctggctaaggacacagcaggcattacctgaacatccccacaataaccccgggatgtagttatcacttcccttatcgttctcatttagacagaagaggaaaccatggctcccgctgctcacaggagaagctagtattattcccctactctgaaaaccaactggatgtcccgcaatcatgggaatacaggtgcaacccatcacatatggccaattgtttttaaattttttttgtagaggtggagtcttgcaaagtggtccaagttggtcttgaacccctggggcaagcagttctcctgctgggacctcccaaagcattggcattactggtgcaagccaccacacttggaccctttttatctagataaccataggtccggagatgactgtgacaaaagagccatgtgctgtacatagcttgatcaaaatggcaaaaatgtatatgtttatgactgctgttttgtgtattcccgatgaacacatgcctttgttgttgattcttcatctatcttccaatacaattttaggtctggtgataatttctggatttctctatttatagaaaactttgaacttcataaatattaaaatgtcctattagctacatgcagactgctttttctatggccatggacattatgcaattattacccgagctattaattaaatttgaaaatagataaataatggatagggatgctatttatgagttaaaagtgagaaaatgaaaattattctccattctgttaccttggatgagtctaacctactgcatgctctcagcttttattattgaaagtcattatgttactttgcataaaatgaacaattggttgtaacaagtcagccctgtacagtgaccagttttcagatgaagtgattaaaatattttctcaataaaacaatcaaaacatggcccttggccaggtgtggtggctcacgcctgtaatcccagcactttgggcggctgaggtggtcggcttacgaggtcaggagtttgagacaagcctggccaacacagtgaaaccctgtctctactaaaaatacaaaaattagctgggtgtagtggcaggcgcctgtaatcccagccactcaggaggctgaggcaggaaaattgcttgaaacccgggaggcagaggttgcagtgagccaagatcgtgccattgcactccagtacaggcaatagtgcaagactccatgtaaaaaaaaaaaaacaaaaaaacaaaaaaacaaaaaaaaacatggccctttcacagtagtcaaatactgggtaatttccatattatacgagttagaaacatgaatctcaccagagaaaaggtatgtccccaagaacagagtgaacatgtattttgggagttactgcagaaagctttcatgaactctttctgataatataatgcgctggtagatttcctctggtcaacttggatttcagtcttccgtttctaccttttaaaggaggccttattagtctctctggttgatagaggatgcctgtttgttcaattcacactattcatggacccctatatgcctttcaatgatcatcctataaaagttatctttccactgcgtttactagatttgagttatcaaatggaaactctcaccaatgtctttgaaacctttttgttttcaccatgcctcataataagaaatacattttacattgaggcagcatgcacctgcaataataagcaagcgcttcacatgcactttgatgtgctccattttatttctttttagaagaaaatgttggtcacaaatgacactcccagttttgtggctgctaatggacatgtgaagcacttacttagttgtctcggaaccatctaatgatctgattcagtgagcaagagtgtggaattgtgagcccgacatgcttacacatcagtctttctgctgttccagagttactggagcgtgcacctggcatttgttgagtctctctttggatggtttgtgtggcactatcagaaacggaactttcaaaaactgataattttggaagataaataattatggaatactcttgcctcagatactttaatattattgagaaaaattacaacaccaggctcagctatttttaaaaaaaatttttggccaggtacagtgcctcatgcctataatcccagcactttgggaggccaaggcgggtggatcacctgaggtcgggagtttgagaccagcctaaccaacatggagaaaccctgtctctactaaaaatacaaaattagctgggtgtggtggcacatgcctgtaatcccagagacttgggcggctgaggcatgaagatcacttgaacccggaaggcagaggttgtggtgagctgagatggtgccattgcactccagcctgcgcaacaagagagaaactacatctcaaaaaaaaaaaaaaaaaaaaattgtagagatagggggtcttgctctgttgccttagctggtcttgaacccctgggctcaagcagtcctctcatcttggcttcccaaagtgctggggttacaggtgtgagccactgtgtccagccaaaatttatttttaatagataatggttaggacagtgaaatttttagtcggctatcattgcaaatgactgtttgccatatgaaacctgtgcttttgaaatgagggtttttattctcataatcggtcaaaacaattgacagagaaagaaagaaagaaaaaagtgtttgtgaaaagattctaaataaagagtgcattgaatgagagccattttgttggaagaaatccaggatcttttgatgtgactactggaagaacaagaccacatgaaggtttatcttttgatacttaattaactaagaatcaggtatttctcagtctctcatctacagctctcctctacacactcacactagcccctgcatgttcttttttgttggggggaactatggcgacaactaaaggctgaaagagttcaggagacaaagaggaactcttagcgaggttgatggggacctgcattttaaagggtgaatgcatgttctccagctggccatatcttaaaggctgagcacatattctataggtgcacatagacgagaaggaaattccaaccatagggatcgttccgcgcaaacacagcaagtgcaagacctcagagagtgccaagaacacccaagtactgtggaaaggggctggaggaagatgcctcccaagagagccagcacaggcccttggacaatgaaaaactcttggaggctttttaagcaggggaagatgatctgatttccattttgtgaagaaccttggaaaggtggatgaaagcagtgtttctaatatctgcctgaattgataagtcaagtcacctaatgtacttgtgtatgtagacatatgtacttatatatgtatatgcaatttcccagtcctcttctctgggattatgtgtatggaatttgtcacatccatttgcgcatgtatttcccgggcacctactgtgttgtctactctgccccaggtgtgggaattaggcagtggccatggccagtaattctgatcctcatccatcttatgtgctgttgggagagaggcagatattaataagcaaacatctaaataaacaagatagtttccggcagtgacaagtgcaaagaagaaaataaagtactgtgtaagttcgttaagcaaaggggtctcattcgattcaagcttatatcccacccaaatatctagcaccatgtctggaaaataatgatagctgtgcccatggattgtagactgtgtgccagtcattgtcaccggccctgtacatataatacagtctctcttcaaaaccactctacaaagcagggattcttacccagggtcaattttacttttagtggacatttggcaatgtctgtcttgagacaattttcattggcacaactggaagaggttagggagtgctgctgacatctagtggatataggtcaaggatatagtcagacatcctgcaaggcatggggtaggatgcagagcaaagaatgaaccggtcccaatatcaatactgttgagtcttactggccaggcacggtggctcacacttgtaatcccagcactttggaaggccaagacaggcggatcacctgaggtcaggagttcgagaccagcctggccaacatgatgaaaccccgtctctactaaaaatacaaaaattagctgggcgtggtggcatgtgtctgtaatcccagctactagggaggctgaggcaggagaatcgcttgaaccagggagtcggaggttgcagtgagccaagaccatgctattcactctagcctgggtgacaagaaagaaactctgtcacaaaaaaaaaaaaaaaaaaaaaaaatagcgttcaggttgagaaatcctacagtgtaacagggtactagtgttaccccattttcaaaagcacaaaagatgcaggtgacttaagtgataagcccaagctcatacagctaggaagaagatgatgcgtttaaaactggagagtctgggccgggcgtggtggctcacacctgtaatcacagcagggagagatttgggaggtcgaggagggcggatcacgaggttaggagtatgagaccagcctggccaatatgatgaaatgccatctctactaaaaatacaaaaattagctgggcgtggtggcaggcacctgcagtcccagctactgtggaggctgagacagaagaatcgcttgaatccgggagatggaggttgcagtgagctgagataacaccactgcactctagcctgggcaacaaagcaatactgtgcctcaaacaaaaaacaaaacaaacagaacaaaacaggagagtctgtgtgcagagctccaatatgtaacccccacaacctcaggatatctgtgagatacacaaatgcagacgcaaatgactgttctgacagctaacgtagggacttcgaagtctctatcggtgtgaaaaataagaaacattttctgcagatgggtgccaggtaagatgggttcactttgaggaccttggtttaatcaggatatcaaaatttgttgtttccttgtgcttgtcacaatatcccattgttaacacctgccagcgttgtcatcctaaactgttgctgctgtttctgagatgagctacaacaggtgtgccaaatattgggccattagcaagcggtaattcacctgcatgaatatttatcgtcttgtaaggaggaaacaaaagccgtgtctactttttggaacatggtgcagcagtgtcctcgaaaccaaattgtttgagtctctcgcttatgcggaaggagaagggctcctctgtaattttccatcgggtggatttattttctcagccatctccacatcaaaacacaacactgacaggcgcttgattttattaagccggtaaaatcacccgacagtttagatagctcaagcctctgattatcaaaatatctattcttaaactggttttgaagccagtcgcttctccatggggaaatggccacaatgatgagcaggacaaatttttgcttttctcccctctaattccttccctccctgcctcctccttctccttgtcttgttctttttttcgttccatttttctttttttactgaaagagattgtattaatgaggaaagaggagaaaactcagaaacagataagaaagagtggcaccgaggcttcttgtacaagggtgattgtaaattttatgtcctcagtaagaaccccaaggcgtgtgtgcttttaaacaaaaagaaagtctaagggagaatatgccatttccacgcccatgttactgctgcattcgcacctgtcagcactgcggcctgtacctccttgtccagcaataccatactaataacataccttacaggatacacggatacatcaaacaggttgcagtgctggtaatcactgacttagaaaccaaatgtgctgtcctgaatttttaagtattgccatgactaaggaagtaatgatggattcccaataagtgtgtttgccatttgtgtttggatatcatcactaacagtaactttctgtgcatattttatggtgatcacttatgggatcattccttaccttaaatttgtgcagatcattcctctttctttctttttatttttttgagacagagtctctctctgtcacccaggctaaagtacaatggtgcagtcttggctcactgcatcctctgcctcccgggttcaagcgattctcctgcctcagcctcccaagtagctgagattacaggtgtgcgccaccatgcccagtaaacttttgtatttttagtagagatggggtttcaccatgttggccaggctggtctcgaactcctaacctcatgatccacccaccttggctgtggaaagtgctgggattacaggcgtgagccaccatgcccggctgaattttcacctttctttccctttccatcggccctctctactgattctatgtttatacttgatcaaataagagtttcagttagtcaaatataaatgtgtttactttttttttttttttttttgagactggagtgcagtggcactgtgttggctcactgcaatctctgtctcctgagttcaagcaattctcctgcctcagcctcccgaatagctgggattacaggcgcccaccaccatgcctggctagtttttatatatgtagtagagacggggtttcaccatgttgtccaggctggtcttgaactcctgacctcaggtgatccacctacctcagcctctcaaagtgctgggattacaggtgtgagccaccatgtctggccttaaactcctttctttttaaaaaaaaaaaaaattaagttcaagggtataagtgcaggtttgttgcataagtaagcttgtgtcataggtttttttttttttacagattatttcatcacccagatattaatcctagtatccgttagttatttttcctgatttacacatgtaaatcattaacctaaagaaagcaaaagacagaactttcttctgagaaaggatgtatgttttcccttttggaaagttgtattaataacatctaatccttggggagtgctcagaaattattttctgaaagaatgaatgaatgaatgatcaagatcaaataagagacacaggccaagccttcaaacaagttatactgaacccagagggttccctcaggctccttactgccatgactaagtacgaatggtaagtaacatttgctaaggacttactggggagtgtcatggtttatgccatttaacctcatgagggaggcacttatatttcccctattttaccgaagggtagctgaggcttggagagaccatatggcatgcccattttagccagtgagtggccgggtctggaaataaatctaggaggtgtgtcctttaaccactttgtagaaccattctcattatagtaatggagaaagaacagaatctcttatggtgacttctaggactaagggcacataataagagctgctatttggggaatatgtctataaacctgggagttataaagtagggtgagaaatgggggtgcattatgatgttatctgagagggacttggaattcacatcatctacaattttggacagatgtctttctgcaagccttattttttttttttttttttttttttgacagagtctggctcagtcacccaggctggagtgcagtggtgcaattataggtcattgcagcctctaactcctgggttcaagtgatcctcctacatcagccttctaagtagctgggctacaggtgcatgccaccacacctggctaatttaagaagtaaaatttttatagagatgggatcacactatattgcccaggctggtcttgaactcctggtccttaatcagtccccctgccttggcctcccaatatgctgggattacaggcatgagccaccacgtctggcccttcatgcaagtttgatatgcttttccttcactggggctttctccctgagtattacctgaaagtcagaaaggtcctatgtggaagaaccgttgtattgcaattactggggagcagaaggaaagtgattttggaaaaagcgtatgtatgggcttggaaacttttccccagaacagagaccatttgcagacttttcactgtggccgtttctcccagtcttgatagcctttcacacatctccagggttatctttgcagtgactcagtcattattctacaggccagcatgatttttcttaaattttctaaacctttttccaaaccttcaattttataaaatgtgacacacattttgacttcttttataagacctaattcgaatgccccctcctttttgaagcactccatgatttttttctactgtccaggtatatgctgtggtatcgtattgcagagtcattactctttgcctgactggcctggaattgcctgttgacatacagtttccctgctggaatgtgtgagctctctaaaaagtgtggagtgtatggcttggtttgttcattcttgattcatcactcacgtgtgtctctaagtagcagctgctcaataaacattgaagggaggcagagacaagacagtgctaagaaaggaatgaagacaataagcaaaagttaattcaagtacatttctaccaaatttccggaaccagattcctaagcagtggaggcagaggagaatgaaaaggtagagtgggccccgtgccaatttcatttcagaaaacattcagagagatgcttccctgcgtggtgtggttgcagagggcccacctgtacatctgggatacctacaggcatcccaccattcccgttcttcatagactatatgacacatcccagtcgtgttctatcttttacacgcagcacacacaccgcaatttttgccttgctgagcttttaaaactcttattatctcagattatgaagacaagctgtgcggggtataggcatgatctcaaactgagttaattgaaggtggaggtcagttcagctttcctggaccatcaatcagtaaaaagtttacttgtttaatgcacggagagtcaaagacatgctgcaggcccccccatcccttcccttctggcctgtcaggtagatgttagatttcactgagctgttaaaaatcttaatggatcccactgagctgtttcaggttgtttgtgacaatcacttaatttccttgttttgcagctaacaatgattttaatcttcatttcagattaaccacataaagcctcagtgtccttttctcccgttgtcttgcctgcttcaactctgcagtcgatgaaagggagaactctttccctttctcttcagcagagcctgaaaaaaatgtaccttcagcaaaattatagatgcagtaatttctcatatatgttaaaaatgcacagtagcaaagactggaaatccagcaaagtagtagtagcaattgcctccaggtggttagagtgtggggagattttttttccctacctctttcattttttatttttttacactttcaacattttctgtgatgcactttataatttttacaataagaaaatgtaaattaaagaattggtgtttctgaatcaaggatgaacaaagaaaatgtagtcttttgaagagatgttaagccagatatttttctactttaaagggtggagaaaaaccacatcgggataaaagagtgaggctgcagaattagcttgcaacttgaaggatgggccctattacagataatgctgctgacagcctcagttcatcacgtttctcatttttagtgtattggtgtttgctcatatgaaagttcccagcttgtgctactaattatttcatcaccattcacttgtacaattgacagcctttgaaccaatatcagtgcagagaccagagaaacgattctgagagagatgattcaagaggcaaagattggggaaatgaagaagacttatttggcactctctgagtgctttatgtgtgggatgagggtgacatagtgcaaggagtaaatagtgttgtcattttaaaaggctagacctgcatcaaagggcacttactgtaagcctgaaagtgggtggactgaagggctctttcttccaatggccccttgttgcagcgtgaacatctcccatctttatattgtgatggcactattcctcaatggctaattgctaggcaatagaagacataatttagactccaatttgtaagtcaatcacatgaaggctggatgtgagcaagcttggagataaatgaaccgtggtgtaaacaagagaggcccagaggcttcttgatccaatttcaggaatcccaggctaccctgatgcgttggttgagattacatcctctccttcgggaggggacagagggcagcccgcatctctgctcttccatctggagccgctctctatgggagaaggagtcttgagccctttgttggctgttgatttgatttttaaaaggaaaatctgacaaatcatgttgaatgagaaaagcgtattatgtgaacgtaaaaacgtttgcacatctgaggaccacgcgattttattcaaggaagttctacctttaaggaggttatgaattctgaatcagaattttgtcgtcaggggaatgcttcttagaaggaaggaaatgtactttttaacaagattttcagcaaacgttgacacattcattatggccatgagcatggaggtggctcaaatatattttgcataatgtggaaataatattgcattctatttgttcctgcctcctagcgtcaccacgaatgacactggcacagaagaaaacatgggtgctttagatcacacacacaaaaaatgatcgggataaatttaacacactaatcatcgtgaaggggcttctccatgtatcttttcaatacgcaggtttatctcaaccttggcccagctctgtgcagttttataccataaacccagtcagactccgtcttatgctaaaagacctcccccctcctcagtcacaaatcccatcaaatagactgtggtcccatttcctggtcctgttcctcctgtttagggaccagaccttttttttttttttttttttgtggagtctcactccgttgcccaccctggagtgcagtggtgctatctcggctcactgcaacctctgcctccaggattcaggcaattctcctgcctcagcctcccgagtaggtgggattacaggtaagtaccaccacgcctggctaatttttgtattttgttagtagagatggagttttcccattttggcctggctggtctcaaactcctgaccttacgtaatctgccaccttggcctcccaaaatgttgacattacaagtgtgagccaccacgcccgaccacctctccttttttttttttttaactcaactttctttagattcaggggtacatgtaggtgcaggtttgttacatgggtgtactgtgtgatactgaggttcggggtgtggatgatcccatcacccaggtagtgagtgtagtacccaataggtagttcttcagcccatgccctcctccctgtctttcccctccagtggcccccttgtctattgttcccatcttatgcccatgtattagttcacttgtattagtccattctcacactgctataaagaaatgcctgagactgggtaatttttaaagaagagaggtccatggttctgcaggctgtacaggaagcataatggattctgctcctggggatgcctcaggaagcttccaatcatggcagaagacaaaggcggagtaaggtgactcacatggcaggagcaggagcaaaagagaacaagaggggcggcgctgaacgcttttaaacaaccggatctcaggggaactctttcactagcacaaaaatagcaccaaggggatggtgccaaatcattcctgataaatccaccgctgtgagccaaccacctcccaccaggccccacctccaacattggagaccacaatttgacatgagatttggcaaggacagagatccaaaccatgtcaaatgcttagctcctacttacaggtgagaatatgcagtattcagttttctgttcctaggttaattcacttagattaatggcctccagctgcatccacattgctgcaaaggaaatgattttcttttttatggctgcatagtattccatgctgtatatgtactacattttctttatccaggccaccgctgatgggcagctaggttgattccatgtattcacaattgtgaacagtgcagaactctcctttcatcattgtttttcctcccaggttgctgctgttcacttctctgtccagtctgtcaacacccaactttctctgataacaatacagtgtttgttgtatctgaccaacattttgttcggccttccgcaagctgcagagaaactttttgagagtttgataataaatcttgccatgatccctgtaggaggcacgtcttcctgaccaggcgtggtggctcaggcctgtaatcccagcgctttgggaggccgaggcaggcagatcacctgaggtcaggagtttgggaccagcctgggcaacatggtgagaccccgtctctactaaaaatacaaaaattaaccaggtttgatggtgcatgtctgtaatcccagctagttggaaggctgaggtgagagaattgctcgaacctgggaggtgaaaattgcagtgagccaagattgtgccagtgcactccagcctggctgggtgacagactgagactctgtctcaaaataaaaaataaaaaaaaggaagtatgtcaagtatgtcttcctacacaggggagcagagaaagaccaagagcaagacacagtggaggagcagcactgatggagagacatgccccagaggacgtggggaggtgtaggaatcccagccgccagatgagagttcagctacgacgcagcactgcaggcccaggaaggccatggtccagagggaatcagaacagaagagaaatgaggagcccagataagagatccaccctgaatcctagtaacacacagagggcggggagctccggtcttgaggctaggaaacagtcttgcatttgggcaagttgtccttgtatgaagtgccagttgtgtccaggcgtggtggctcacgcctgtaatctcagcgctttgggaggccgaggcaggtggatcactaggtcaggagttcgagaccagcctggccaacatggtgaaaacccatctctactaaaaataacaaaaatcagccagatatgttggcatgtgcctataatcccagctactcgggaggctgaggcaggagaatcacttgaacccaggaggcagaggttgcagtgagctaagattgcaccactgcactgcagcctgggtgacagagcgagacttgtttcaaaacgaaacaaaacaaatgaacaaacaaacaacaacaacaacagaagtgttgcctgcattaaggaggcagtctaagctgtctggcaacttggaggacaagtatcaaagataaattgagattatgtctcattccactgggtgcttccattataatattgcagtggttatcaataggcagtaatcccgtgtcccctggaggacatctaaccatgtatggaaacatttctaaacattaaaagtgaaggaaaggggctccaggaatgctactgctcagcatctttcaggacagccctcactttaaagaattatccaacttcacttgttaatagtgctgaggttgagaaaccctagtacatcttaagagcactgtgtgtgtgtgtgcgtgtgtgtgaacgtggggagataattataactttgtaaagatggatctacaaggatgttcactgcagcattgtttacagggctaaaagcataagcaacctcaatgttcaactatagggatgtggaaagacatgtaataattcctcttctaagatgaaatgacgttgcaaccatggtaaataatgccttaggttaaggttcaatgggatggaagagtgttcctgagatgctattaaatggaaacaaacaagttatacaacactatttgcactatgttttactttcgttttgaaaaggctatctatagatatttgtatttattgcatctaagtcgacataccaaacagaatacaggaaaaaatactctacaatattattattacttggatattgaagatgtggatgaactaaatattttcactatgtgttgtttaatatctttgcagatttccacaaataatttatttgactttaataataaggatgaaacaactttataccttttagtaatattatttttcaaagcatggagctgaaatctgagtagatagaggaaccaggattttctgtcctgggttgattttttagccagaatctacttccatatgcagacaggaaggagagtatggtcaacaggtatgaagtttggggagggtaacattgggctctcactttaagcattgatagctaagctgaaggaggaatactctaaaatcattgtcttctcatttaaatgctcttgatcaaattaacagcctctcctgaatattccaattatattaaaaatggcagtagtgttcaatttgccttctgcacaccccctacccaacctctcaccatttctgtgggcttgggattaggcggtgctgtgttgtgtataagggtcagtcttatagggcaggagcctgggctaatagaaagactgtgacttcatgttcctaccaaagaaaaacaagtttatctactgtatgtggtttatcactattttttttttgtgaagaaaattgtttgttttgaaaacagtttgatggactttgtaggcatttctgtggggaagatttgtattgcctggtttattctgtggatctaattcatacacacacacacacgaacgttttgatagagtttgcagagtttgcttctgtttcagaaggtttaaaatttcttttattcagggagaaagagtttaatcaccattactctttttacctttttatggagggaaaatttacatagcataatgtcaatcattgtcaagtgtacaattccgtggtatttagtacattagcttcccaaaaagaatcccatgcctattaagcaacccctccccatttacccctcccccagcccctggctaccactaggtacacctcatctatttaatgttactgaattgtagaatcttgttggcattttactttctattgtagctagctgtttctctgtctctctgtctcattttctccctctctctctctctctctctccctctcattgtctctctcttattctctctctctctgtctctctttctgtctttccctccctccatccctcctcccttccttccttcgttctgtccctctttccctctccctgtctatgcaatagacaaacatagaaaggcaggttcaaaaacagatggggagatgaagagaaagagagaagggtgaagaagggagagagagaagggagaagggagagacagaagagagagaaaatgaaagtaagagaaaaagagggagggagaaggaaagtgtccaggaaagagagagaaaagaatgcagaggacaagaggaggggaaagagataatctaggagtcggagaaaggcagggtaggttttgaaagaaaggactaaaataggcctggtgtggtgatgcacacctgtcgtcccagctacctgggaggccgaggtgggaggatctcttgagcccaggaggccgaggctgcagtgagccatgattgtcccagtgcactccagcctgggcaacagaacgacaccttgtctcaaaaatcaaaacaaacctactccttctcacaggcacacctcagaaagaccggcagagaggcccctatacccccattgagacagaagcaatttgaaagaactgttctgaaatttcaaaagtgtctcatcatccagagaatgaaaaaaggaaagtaggttagacctgtcttgacctctgcaaattcctgccacatgtctcctgggttctgcccatagcaggctctagctctcagtggtgtaaacttcttgagcatttgggggtcacgctgtcatccctggagtcctttcgttaatgtcctgaaaccaactctccatcagtgttttgccttttcagtattctatctcgctgtataattgagtttctgtgattccaatgcagactatggcatgaactcctgtgtgtctagttattatagattagccctgctgatattatgaggtagggaagggttgatatgctgtagagtgacacagaaacccgataacaatgggaaaagagagtttcatataaatcttcttaagtatagtatttccatattaaatgttataaagtgaaggtctggctgcattgataatgtgccctctgctgatggaatgtgcttctgccctcttggcaggcttcctgtggatcctaggtgataaaagccgtccagagtatttcttcattatcatcgtcatcttatgtttacattattctccttgtcactgagaactccagaccccagtctataggaaacggttcccacattgttgaaatatggctggtggtacagggagtagttctgaacgctgagcatggcctcatttggaatattttatgcaatgaaagtgccggtgagaatttagacagcaaagcttaccagtatgaagcagaaaaaggcaaaataaagaggcgtatgtatggacattgcattcatgcatttgtgcccaatggtgttgaattctccttacaccttaatgaaagagtaaaaatgttgaggaggacgtggagctgccaagtaaggtggattattttttgcaaacaattgtattaccattatgatataatgtattactagtatgatataattctatctgccatgatgtgatatgatttataatgatttaaacagttgtattatcagtgtgatacaatggtaggatgatactataaagagatagtgatttcagagtattgcacaacctctgaagccatttggcctgagttcatgctcttggttcacccgttaccaggtgtgtgactgggagcaaatcacaccctggtcctcagttttctcatctgtaaaatggaataataaggataatttatagtattgctgtgagggctcaggagttaatgcatgaaagcacttagaaatgtgtttgatgagaggccgggcacggtggctcatgcctgtaatcccagcactttgggaggccgaggcaggcaaatcacttgagcctgggagttcaagatcaacctgggcaacatagtgagaccccatccctacaacaaatacaaaaacacttagccaagtgtgctggtgtatgcctgtagttccagctacttggaaggctgaggtgggaggatcacttgagcctgggaggcagaggttgcagtgagctgagattataccactgcactccagcctggacaacagagggagaccttgtctcaaaaaaaaaaaaaaaaaaaaaaaagtgctcgatgcctagttagcattccatacattgactattaccattttcattattattaagttcatgtactgaaaccttcaataaaagcagtatttactgggtggaatacaaaactaatgtatgtgtatgtagtttatttatattgtaattttttattctgtataatagaggcatattctgttattaaggaagtaacttgtgctttctgtgccttgattttctcatctgtaaaatggaagtaattctgttactttatagggttgttatggtgattctaggaattaatgtatgtaaagtacttaacacacactggataataagcttgctgtcatcatcaccatcattgctgttactattatctaaaagcagctcacgtcctgaaatctacagtgagaagaatattcactgggctacgtaaacaaaatatacatgctcatctatatagttctttgatataatcatttttattctatataatacaagaagttcaatttttgagtcaaaatggcaatgggaagtctaaattaattcaacacacaaacgaggctgtgattgtttgttttactagagatttattagctttatcaaagtatcgtgtaggaagtagtaaagcgtattcttagatcacagcgcatttgagatgtggttgggtttatggacctgcggcgtgcacagacttgtctgggaggtgcacattcggtgacatgcacctgctctgtgctgtttcctggaagaggagaaggtgcgcccctcccactgattaggcaggcatccttgtgtgggggattaaggagcatattcagttattagctgtgaaatgtcgtggctgcctctgcattgccagctgtgattggtgctggattttaattatcatcaagcaagttccaaatgtttgaaatgtgtctgtggagagagctttggtggagagtgggagaaaaggtcttgatgaaggagcaaaaccttggcatcagccgtgcacacggccctgggatctttgccagctccccaccactgctgctgcagggtttcttgttgaccctaggggctagccccttccattatagaataacaacagttgtcagaaagccatttctcatatttacccaacattcacttttctatagatcctaaaggccctggtattttctcaggtgcaatgcagatgattcttcattcattcatccatgtgcacctctttgtctgtttgttccttgttcaataaatattatgtcaatgcctgctgatatggtttggctgtgtccccacccaaatctcattttgaaatgtaataatccccatgtgtcaagggtggggccaggtggagataattgaatcatgggggcagtttccgccctactcttctcatgggagtgaataagtctcatgagatctgatggttttataaatgggaattctcctgcacaagctctcttgcctgctgccatgtaagatgtgtcttgctttcccctttgtctttcgtcatgaatgtgaactgtgagccaattgcacctctttcctgcccagcgtggtggctcatacctgtaatcccagcactttgggaggccgaggtgggtgaatcacctgaggtcaggagttcaagtccagtctgaccaacatagtgaaaccccctctctactaaaaatacaaaattagccaggtatggtgacacatgcctgtaatcccagctacttgggaggctggggcaggagaattacttgaacccaggtggtggaggttgtagtgagcctagatcacgtcactgcattccagcctgggcaacaagagcgaaactccatctcaagaagaaaaaaaaaaaacagaaaaacaaacagaaaaagtctttcctttataataattacccagtcccaggtatgtctttattagcggcatgagaacagactaatacacctactgtgtgctggctgaggttctcaacgttgtgctgggcaccagggaatataaaacagtaagactcagtctctcctcttgaggagctcagaatggatgtggccggggaatgacaaaatgctatgatgtacaaatgtgaacaattagaatttgtacaaagaaaggaagtttggattaatgctgtcagagtgcaagagcttggggattcttcatggaaaagatgatgccagagaagagctttgaagaaggaaaagggtgttttctaggcaaactcaagtggagttgaattaggagagaagtgcgaagacatgacggatggatggaatgacacaggccaaagaatggagttaggaacgatgtgctgtgcttgggagctgcaagttctgctgacgggtggagagtaaggccaggtgtgagaggaaacaagccagatgggggagcgggatggtcacataggctttgaatgctgtgatgggaagtttagactttacctggcaagaggtagacaaccaccaaatgcttggcaacaaggttctatttgcattttagaaaggccactctggctgcagtgtggatgataagtcagtggatacaagattaaaggcagggagactagtcaagaagttactgtggtcaggaacagtagctcatgcctgtcaccccagcactttgggaggctgagataggagggtttattgaggccaggagttcgagaccggcatgggcaacatagtgagtcctcatctccagaaaaaaaaaaaaaaaaaaaaattagccaggtgtgttgctgtgcacctgtagtcccagctacttgggaggctgaggagggaggattgcctgagcccaggagtttgaggatgcagtgagccaggattgtgccattgcactgcagtctgggtgacagagcaagatcctatctcaaaaaataaaattaaaaagatgctactgcaatggtctaggtggggaaaggcaggtgattgcactaagttaggggtaatgggtttaggagaagcaggtggtttgaataaagttaggagggagaatagaggatcctatggctgtggatgtggtgcaaagagtcaagaaggatacctgcttctagcataggtgaggcaggtggatggcaacagaggaaatatggaaagaaaagtctttccacaagccctggaagagggagggaaaaggagcgttttggtggcatgcagtgacggtccagcccactacctaagcccaggaagcgtcacgtggtacttctcaacaggcagaccaggtatctgagtaaatgtctgctcagttggcaggtgtcagagaaatctacaagcagataaaacaggggctccgagggtgtaaatggtgggatttgaaggaaggtgagtacaaagatgatgctgggggtaagtgtgagatgtgaatggcatgaggtcttggcaggtattacaaggacttgggcacttagtctgaatatgatgggaagccagccatcacaggattttgaacttccaatggggtgctcctgtagtcctggctactttaccagctttgtgacttggagcaaatcattcttggtgactcagttttctcatctgtaaaatggggctaacactggtcatttacagagttattgtgatgatttaaggagtttatttatgaacatgtccagaaatatgcttgcttgcttgctttctttctttctttctttctttctttctttctttctttctttctttctttctttctttctttctttttcttttttgaaatagagacagggtcatattctatcaccaaggctgtagtgccactgcacgactatagcttattgtagcctctaactcctgagttcaacggaacctcctgccacagcctcccaagaagatgagactataggtgcataccatcaggccttacctatttttgctttttaaattttttgtaaagatgggggtctgactagttttctaggctggtcttgaattcctgactttaagcagtcctcccacctgggcttcccaaagtgctaggattatacgtatgagccacgttgctcaccctgaaagtgctcagaaacatgcttcaggcataggtagtatttaacaaatttgctattatcgtttacattattttacctgaagcttgtatctcaaaatcttcaataagaataatatttaatgaggccgggcacagtggctcatgcctgtaataccagcactttgggagggcaaggcgggcggatcacctgaggtcaggagttcaagaccagcctggccaacagggtgtaacctcatctttactaaaaatacaaaaaaaaaaaaaaatgagcggggtgtggtggcggatacctgtaatcccagcttctggggaggctgaggcacaagaattgcctgaacccaggaggcggaggttgcagtgagccgagatcgcagcactgcattccaggctgagtaacagattgagaccctgtctcaagaaaaataataataggctgggtgcaatggcttatgtctgtaatcccagcactttagaaggcaaaggtgggcaggtcacgaggtcgggagttcgagaccagtctgactgatgtggtgaaaccccatctctaataaaaatacaaaacttagctgggcgtggtggtgcatgcctgtaatcccagctactgaggaggctgaggcaggagaattgcttgaatctgggaggtggatgttgcactgagccgagattgcaccactgcactccagcctgggctacagagtgagactccatctcaataataaaaataatgataacaataacaatatttaatgaaataatcatgctgtcttacttgtgagatgccatccttcgggctgttgatttgggaacagagagaaagtcaggggagaaagtcaggagctcagatggaagccattgcagcagttcaggtgggagttgatgctgccttggccccacatggggctatggatacagtgaaaagcagtcaggtgttgtgtaggtatagctgatgggagtttttggcatagcaaatgagaagtcatagagaaagacaagagtcagaaatgagaagcagagaaggtttgcttcatttcagcattatgttctgttggatgagcaacttttaaaaatggagccactatttcagttatcacttccaccagacactgtagagcctctgtcttgaagcccctgacctgcccctgggtgtagcccatcacctttctcatgggactcagacatgaatgcaagtgtggggccagaggccagcctaggagtgagatagactcgctattctcagaatttcccattcctctgtatttcatagtttctcattggtgctgtaacaaattaccacaaattcagtggcttaaagcaagaaccttatgaacgtattatcctcgggttctagagatcagatgtctggaaagagttttagggggataaaatccaggtgttagcagggctcagtttcttccggaggctccagggaagaatctgttttcttgctttttcctgtttctggggactgccactttccttggctcatggtcccttcctccacccttcaaagcacatcactccaacctctgctccatcatcacacctccttttcctctagctccaacctcttttcatttttcttttttttttttttttttgagatgggggtctcactctgtttcccatactggaatatagtggcaccatctctgctcaccgtaacctccacctcccgggttcaagcaatttccatgcctcatcctcccaagtagctgggattacaggcatgcaccaccaaacctggctaatttatgtatttttcatagagatggggcttcaccatgttggtcaggctggtcttgaactcctgacctcaggttatccacccactttggcctccgaaaatcttgaggttacgggtgtgagccaccgtgcctggtcacttctaagggcacttgtgataacataagacacacctgggttatccggaataatctccccagctcaatatccctaattacataacatctgcaaagtccatttggctatgtaaggtaacacattcagaggttctggagatgaggacatggacgtctttgagaaaggccttattcctcctacatctccaatggccaaggcttccttactggcatgggttccttccccagcttcctcttctcgatggccatgaaggctcctcagccttcctgcaaataggcccatcccacagtttttcccccgtgcctgactctcccttagtcttgagctgaaagccctcatttgtgaactgtgtattcatttaactcgattagctcatgtatgtaatgcacgtcgcatagtgcctggcacataggaagcaacttctaaaatagaattcagtctataaatataattttgaatcatggttctgtcactctgcttccaagctgactatgggtctgcaccatctgtaaatatgataaacacatcttctcaggtcatcctttccatcattgataaaaatgtccaactagacagagaactctgacattgctaacagcctataatctgtttataagtattttatatattttttagagaatgaccacctgcatttccaatgtattcttctcttccaatgatttgtacctcatgatccttcatttggcatttactgagttattactatgtgctaggcaccccaggaggttaaatgataaatgacaaacatgaggccagcttccaaggagcttgtgaatcatgctggaagatatgtacatatacgtgcacagctgttccatttattaacattctttggataaattgatggatcagccctgagtctaagctccagcccacattcctcattaattccattaatactgcaatacactcaatctatagcattagtcagtcgaagtgtctaggacctcaaaggaatggaagaggatttgcttgccatcactttttcgtagtgaacgcatgttaccactgaaggatcacctttactcattcagagtggtttcaaggcaccaattagcaaactgttgtgtaacagatgttttgtgtcattgctagcactcattttgttattgttgttattgttgttgttttttgttttgtttttgtttttgagacagtgtctcattctgtcgcccaggctggagggcagtagtgtgatctcggctcactgcagcctctgcctcccgcattaaagtgattctcctgcctcagcctcccgagtagctgggactataggcatgccatcacacccagctaatttttgtatttctttttcattagaggtggggtttccccatgttggccaggctcgccttgaactccttaccttcggtgatccacttgccttgtcctctgaaagttctgggattacaggtgtgagccaccatgcctggccagtattcgttttatatagcatctacccccagcaagatttatagacactggggcatttacccatttccaagtggtttgccttctcttcagttacctataatcactgcatctaattctgaaatcataatgtttgcaagattttatggcacctgggacacaattgattggggtctagattgttcattttaatcaaagtaggagctggtgcctatgtggtagtcaaacagtagatggacttatctcacatgtgccattcatcaaattccaatgttccatacatttatgaatgatctgtgacacacaccatgacttctgttgcatcgttttcccaccacgaacttcacttagcatgtgatggtttttcattcttctctttgttgtttggaggtcattctcttggggcaaaagttaaaagtcaagttagaaatggttaaaatctgcattttcaacacattggagaaaaactctggctcctggaaacagaatgaggaaagcatgaaaatgtggtgaatactttaaaaaagaaatatgcattttctcttctggttaaaaagataaatgcagctcaatacagttaagtaaatgttatacctgctttaagggtgatattgaccatgggaatgcaagagctacccgaattaaaaatggctgttggaatggtaatgcagtatcttgaattaccagtgaaattacttttcctcctcttaatgccttttctctgttagtatattttataccaccaatagccataagcacataaatacctggaagattcagtcctgtcctgtgctaggctcttgctcagaaaacaggtatttaattcccttatacatgatacagaccaaattgcagttgttgtaaaacatgctgtgaacaattttgacagtatcctgcctggtttttcttcacttttttttttttttttttttgccttaaaaagttttatttcacatataggtccaagttgaaatattattttttctggggggaaaaattaccaccccaagcccagtttcttctcaacacttactgtctttataattaattaatttgttgatgatttttctgtcaataccccaatggactgtaagttacataaggaaagccatgataatttgtatccccaaaccaaacacagtttccgagatgtagtagtaactcagtgattatttgttggatgaatgaaaatagacacaaaatggtacacgtatattgaataaattagggttatggaaaaggtcacatttctttaggaagtttgtagaggtggtgacatttaagcaaactgataacatagggggatttattataaattttctctccagtcgatgggcatagacatacttcatcccttgcaggcccagaatccgagatgtctatttttgacttgctatatatagagagaagaaacagtccctctgaatgtgaagttactcagtatttttggctctttggctattttcaaggttcttcatctggacttaaaaaccaaattaataggcgatcgtttcctcccatcttttgcacagacactattttaggagaagaagatctatcacccacagcatgtcagtgaacgaaggggctgtttttactgttcaatcaggaatgagcgtccacagcatcgttgctcacatactccagtaattccctactgacctgcatttactttatttaattccattaatttaagctaaatgaattttatttttaaaatgtgtctgtgcagaactaagcacagagagcatatttctgtttaactccttttgtttgcagcttgaaaaccaatttggatcttttattttcttttcccttggttctaagctttgcttggtcagtgtcttcagcacctaatttgacaattaaatgtatttcacaacccactgacactgcttcattaggttctccaggagtcatcatttccctgcagcctcattccagtcatttctaatagatggtgtgtgtattagtccattgctacactgctatgaagaactacctgagactgtgtaatttataaagaaaagaggtttaattgactcagagtttcacaggctgtataggaggcatggctgggaggcctcaggaaacttacaatcatggtggaatggcgaaggggaagcaagcacatcttcacatggtggcaggagagagagtgaagagggaagttttacagacttttaaataaccagacctcgtgagaactcattcattatcaggagaacagcatgggggaaatctgcacccatcattcagtcacgtcccaccagctccctcctccaacattaagagttataattcaacatgtgatttgggtggggacacagagccaaaccatatcagcatgccaatgaggctcttctgatgggacaaggaaactgccaggctcctcttggtcttgactcttgtgccaggaaagagtagctggatttcatcccaatgccgttcaccctggggaatacctgggttaagagagtttgtatttctactgatgtctcatcaaagaccttgctatttatgctgtccatatcggtgtcttttgtaaaccgaagttggaaagaaatgtttaaaaagaccgtacaatgtaataattactaattacttgatagccagcacttaataaatgcctgacgctgtgctctgtgcctcacaggtattaactaaattgtatcctgagagaaacctgtgaaaggtgtactgttgtttctatgttaaagatgaggagagtgaggcttaaggagagtaagtaatctggccaggccacttacctaagaagtggtggagttggactcacacccaaatagtctgatctccaaactttgcttgaccacatcctgtagcctcttggtttcatggcatagggctggatgctgtgtgctttgctagtcaattttagtaaagactttagacattgtttggtagtggactgggatcctcaggagttaatcacttttactgtttttaagttaccccgggatttatcaaataaatcgaattacttacagttcttcctctagctataacttatttgaaccctctgagttggggttggcgttgtttggtcacagatgaggagggcaaagtcaagaggcagatgttcgggctttccatagacatttcctgagcctgtataagagcctcaccatgcatataagcaatgcagtggttactgagacatgcataatgctactaggacattatgcatgataagtgttttttctgtgtgtgctcaccactgtacctgagtattcttaacattgtgcatggtactttgttagttatctgcaatatcatatgtgctgaattttgcaactcataatatggacagttgatgatttagtgtatgacatcttccttttgcattgtcactgctagtggcttgaagttctgcacccttagaatagcctggttttctgtgggtgtgagagatgtcctggaaactgaccccagttgaaaatcaatctagcctgtttttgtaggacaactctgttgtgaaaacctatgcactcaagggcagctggatcccacttgagcatgccgatggccccttgcagtttgaagtttgtgttgtcatgaggtcagttgcatacaggcagtgatgatgagactacaggacaggcagggcagatagcacatccttcggcctctgatgaaagatgcaaatggaaactgcagtcaggaaggtataatcaaacaccatccacccatgttaatgcagattgtcaggacggccaacctctcctttccccaggagtgtcacaggcatgattaacgtgctctgagttcagcagaaaccactgtggctcttaccccgggctgtgccttagctcaggcctaggtgaaatgcctgggcaagtgatgggattgtcgaggaatgtggaacatcccctgcttcccttctgcccctttcctcatgcctcctgagctgccccagtcatccaacctgcagtttgggtacagggaagtgttgactggagttcagtgcaatatacccttcctgatttcttgacaaattgtttccccgaaccactattctctcctgtgtggctcagaactacttctagttgctaagcaacccacaagcagctgtagcccacaatatcttctagaggggtagacatattatttgggatacttctccagtctcatctttccctgggagatgtcccttcccaagctctggccttccacattacaaacacacctgaatgaaccaaggtgagcatccgacccagggatgcagctcagatgggatgcagaaagctgggccaatttgatatcctctttaaaatttcaatgaaaatgcaaaaacaatactcagaaggtcttaaactgaaatactgtgtagacttgggacttaggtggccattagtcttactctgtcacccaggctggagtgcctcagctcactgcaacttccttctcctgggttcaagcaatcctcctgcctcagcctcctgagtagctgggactacaggcatgcaccaccatgcctggctaatttttgtatttttagtagagacggggcttcaccatgttggccaggctggtcttgaactcttgacctcgtgattcgtccgcctcagcctcccaaagtgctgggattacaggcgtgagccttaggtggccatttctaaatatacatgtattgatgagtaagcagagaaaggtgtggtacatggcatgaaataggatattgaagagaaaataaagaagatggggcctgtgggatgggagaagatggagagagtagtactcatctatgtctgcaaggtagctgggcttaaccaagcttataatttgtccaggggaatctgggtacctgccaggaggtggtttctgttctggcctatggtatttaggctgagaaattaggaaagagactatatgacaagggtagtaaagactaaaaggattggccgggtgcagtggcacatgcctgtaatcccagcaatctgggaggctgaggcaggcggatcacgaggtcaaagagatcaagatcatcctggccaatacggtgaaaacctgtctttactaaaagtacaaaaattagctgggtgtggtactgggcatctgtagtcccaactacttgggaggctgaggcaggagaatcgcttgaacttgggaggcagaggtttcaatgagccgagatcgtgccagtgtgcctcagcctgggtgacagagcgagacaccatctggaaaaaaaaaaaaaaaaaaatcagtaataggatcaagagggtggtgatatcgaatgagtccagtcaagtgcaacagtgaacagtatggatgagctgggagaatagaaggcaatgctctaagaatggatgcttgatattcagagctggagagagggtctaggctgcgtctgtggagtgtatggctgaggtggagttggaagcaaacatgattggagtcagtgatgagaaagacaagggagaccaggatgttgagtgcaccgtccaagagtgatgaccagagtcatggcggacggagaggcagtgagcccagtgccgttgctctcattgaggaggatgagggaacatgccctggggggtggtgagtggatggcagctgtatgagggatggggctaataatgtctaatgccgctgatctcaagtgagccagggttctaagggaggcaggtgaagagagagttgtaagtatctctggggaacaaataggacccagacatcctaagggaacgagctctctcctgtgtacatagcttcccctaaagtcctctgctagattctttctctctgactgcttgtcagcttcgttttattttcttgtttttttgttttgttttgttttgttttttcttttttttgagacggagttttgctcttgttgcccaggctggagtgcagtggggcaatctcggcccactgcaacctctgcctccaggattcaagcaattctcctgcctcagcctcccaagtagttgggattacaggcgtgtgccaccgtgcccagctaatcttttgtaattttagtacagacggggtttcgccatgtcatctaggctgatcttgaactcctcacctcaggtgatccacccactttggcctctcaaagtgctcggattacaggtgtgagccacctcgtgcagtcagcttcattttctcttatttctgactgtctgtcttcacgtagccaggatatagcccatgttttacgtctcacagctttagcccttgaagagagatggactaaacactctctgtctcatcccaagtctggggaagacagtccttctctattgaattggatgcttatctctgactcaggcagcagtggtcagcgtggcgggagggtcttcctaatttgctattaggatgaattcctagcaagatattatggaatgacaattccacatgcctgtgagagtcactttctaaagattgctctgaggaattcataggctttgtttccaagcttttaattcttccaagcccttaactctcagtatctaacaaccttccctcacaggctgccgggtgatagaaagggtcattgacgtccagcccttcagcagccagtgagaatagcaggggacagagcttgacttagtggtagcttctcagaaaaattcctgggtgggactttggtgcttaaagggggacacatccactcgaatgtttgtctttctggttagaaataaacactgttggccgtgcacggtggctcacacctgtaatcccagcactttgggaggccaaggtgggtggatcacgaggtcaagagattgagaccatccagaccaacatggtgaaaatcctgtctctactgaaaatacaaaaattagctgggcatggtggcacgcgcctgtaatcccagctactcaggaggctgaggcaggagaatcgcttgagcctgggaagcggaggttgcagtgagctgagatcacaccactgcactccagcctgggagaaagcaagcctcagaaaataaaaaaaaaagaaaagaaaaaaaaagaaacagtgttcctctgctgtcttccttctcgtaaattaaaactgcctaacacaccttctcttcaggtatgcagaagtcgccagaaacaagtgttttgtgatatcagtctccctgtcttttctctttgtaattcccaacaattgaggctgtatttctaggaagtgctttgaaagacagcgtccccttctcttgtcctgccgtcattggtcaaaacattttggggaattgcaagggagtagtcagattcatcttttaacagaagaatatgaaaaccttggaatatgatatcagtttggtgcaaaaatgattgtgtgtttgccatgcgaaagtaaccgcaattacttttgcaccaacttaataaaaatgtatctttctgagtcccaccctgagacattctgatgtgaaagtgagtaccaggaatctgtacttggagccagggtctggaaattcagcaggacccactttggaaatattgctttaatactttattagaatggaacttggaaaacagttcccagcccccagttttccctgaacacctactgcctgtttttcacataggcctgggtgagctattgtatcccttccatgtatatgaaggaagcatattcctttccggctgaatcttggccatctcaaaggtgtgaagatttctttcctcccttgttttcctccctttcttcctgtaggattcctgcgtgctatctctcacgttcattctcttttccctactactacaagcaaagcaaacacaaagtaaactaaaatgccccttgttttataaaaatatttcttctgttgctcattttcccatcccccccatcctggccaagcatgccttgtttaggaggttttgcattgttttgatttctccttgtgaagcatttatccccagaaactctctagtacacaaggaccttcctgaaaatctctcaaggatgtgagcaggagccttaacaatacttgaaaatacccagtgtgctctgtaacttctctcccactggtaaacgatgtcctcacaagctcattgatgagagtctctaagatgtacttgttaccaaggatgcaattttaatcagtgatttataaaactgaaatgatagagaaaaatgctctttcatttactaagtcattctttaatttgttcatccagccatctttccatctgtccatctacccatctacccatctacccacaatctacctgccagcctacctatccatttacccatctctccatctagctatccattcatccatgcacccatccatccatccatccatccatccctccatccatgcactcattcaattaacatttattgaatccccatttatgttctacagtagagccaaaagtgatgatttgaacagtgttagtactcaggaaggccactgtcttggtgatagggatatataaatatatatgtgtatatgaacagatattgtataatgtagtggccctaagcacagagtcactgatattcacaaagcataatgtgaaatgaggaagttattcttgtcacgcactgcatcctcatcgattgctgtcctgttgtgaaccacggttgaagtcaggtgtgtttctttacttggttttgtcagtgtgcactgggcaggttgtaaataccacaagagcaggaacagtgtctgcttaattgaatatgctctccccaggacccggcacaatgcctggcacatggtggacgcccaagggctccaaaagccaatgttccaagcagaaggtttgacatggtttggctgtgaccccacccaaatctcatcttgaattgtaacttccacaattcctacgggtcatgggagggaacccgtgggagggaattgaatcatgggagtgggtctttctcatgctgttcttgtgataatgaataagtctcatgagatctgatggttttataaagagaagtttccctgcacaagctctctctctttgcctgctgccatccatgtaagacgtgacttattcctctttgccttctgccatgattgtgaggcctccccagccatgtggaactgtaagtccattaaaccttttttttttcctagtcttgggtatgtctttatcagcagggttaaaatggactaatacaaggcacaataagaagaaaaggccaaagaggccaaaatgcagagtctgtgtggctgaggagagaaagaaaggtatagggaggcaggggaggaaccaaaactgcttttgttagtgggtaaaatgcagagatgaccttctgaagggctggggcttggttctgtgtgagaacagggagtcacacacaggtttgaagcagaaaaatggaacggccaggttttcgttttctatgggttcctctgaaggctgagtggagaatggatttgagggagagtaaaactgatggaggggagggtggcagaagtcaggaagctgttttaagtattccaggcaggagatgatgagaccctgttgaggtggaaacagagaggagagatgtgtgggaggcattcatggcccaggcagaaggagagtaatgcagaatgacttctagatgttagacttgggatgatgggaggatgcaagtggatcagcagggaacatgagaataagagagaacagactgcagaaataataagtttagcctgagattttcttccttttttttatatatataattttttattatactttaagttgtagggtacatgtgctcaacgtgcaggtttgttacatatgtatacatgtgccatgaagattttcttttagagacttttgagaatatcacagggagacatctggtcaactattgcctttatgcatctaaagctcagagaaaaactctctcagttgaggttattgcgttgagatcaacaatgtggtgtggtttaactcatgattatagtcagttcctgcaaagagctggtatagaatgagacaagccaaggataaagtgggaaccagggaagcttattaaccttgcctctgaactccttttttttttttttttttttttgagatggagtttttttttgagatggagccttactctgttgccaggatggcatgcagtgggacaatctgggctcacagcaacctccaccccctgggttcaagcgattctcctgcctcagcctcccgagtagctgggactacaggcacacaccaccatgcccagttaatttttgtatttttagttgcgacagggtttcaccattttggccaggatggtctcgatttcctgacctcgtgatctgccctcctcagcctcccaaagtgctgggattactggcgtgagccactgcgcccggccatctctgaactctttaaaggtgaggctcatttgattcagcatccctgttaactatacacagagtaggtcctttcacttttttaaatttttttttattttttagggatagggtctctgtttgtcattcagactggagcgcactggcgtgattatagctcacttcagccttcaacttctgggctcaagcaatcctcccacctcaacctctcaagtagccaggaatacatgcacgtgccacctaatgtttaaattaatttaaaaactgattttaatttttaagcctagttaattttcaaattattcattagagccagggtcttgtcatgttgcccaggctggtctagaacttctgggcccaagcagtcctcctgcttagcttcccaaagtgctgggatgacaggcgtgagccaccacacctggccagtaggtgcttttaaaaatattattggtttctggagtattggtcaaaagttttaagattcccattgcatcttcaaaaggtagagaatttggtttaaatcacttcattgttttcggaaaaatatagattttaaacttaaaaaaatttctcatgtaagggacattcaagtaacatagaagggaccaggagtttggagtatgttatttatttactcaatatatatgtatcaatgccttctgtattcaagtgatgaatgtgggaccctagggggcagtgctggctaggaattatggccaatgacttaaacaattacttacagatccttggtttcttcatctgtaaaatgggaataagaacatctactttttaggattactattctaattaatttaagttaatatagattaaatagagttagttatatttactataaatgttattctaaatcattttatttatttagtgtctgcattataataagggctgaaagaaaaccaaagagagaggtgtcctgatgcaattatgattacattacctttgcttgtcagccacatagcgctctttttactgagacctaaaagtgtttggatttcccaaaccattgccaaactggtaggtgaggagcctctgtctagcatactaataagctaaggtttgtgttttgcctgtacttttcattttccaggaatgaaaaatacattttcactctttgtcattttaatgaaatcaagtctagggaaacatgaaacgcaagtcacattccttttcaacgggaaaacttcgaaaaccgcacaccagattgcgaactgttaaaattcattcattaaaagttcatggtctattggactttttttccttcaagcgttgcattatgtacatttcctatctgtgtttgtgtgacagattgtctaacagatttcttgtacagtggagttacagagtctgccagaaaggcctagtttggaacctgtggccatcggtgaaagggatttggaaatgccatcttgttagctaccggataatttagtaatcatggcctaacagatccctcaagaccaacaattacatacctgtttgaagctaattggactatacagaaatgggagttatatgaattatatgttataaaaatgaggtaggcgttaagtggactgatattacattctgaaacctagaatgactttcaatcattttagtgcacaggcttagagtagccaggatgcttggcggaggttgtctgtcatatcagagtgcctgtttttagaccgtgtgctaattctgtgtgtcgctatatgcatatgaatgcatactgtgtatctctacgtgcgcggacaaatcacatatttgtttacccttaaagtttgctgataacaagcgttaaaaattagaattcataatccagattttgaaagccgcctgtatgccacaccaaatgctgctgaagagttatgggaaggcttttatttttagcactcagtaaattaaaccttttattcatcattcccaaagaagagaacatccgttcttattaatttaaggaaggggaaagacagccgtccaatcggagtgaacctgtgtgttaggacttgttcaagggagtgacatcacacacgctgtcatccttacatcagttaattaattatctgtgttacaataacaagatatttcagacaagagtctctctctctctctcataataactttaagcatggtagttagagtgttgagttctggttgcaaagacatttcccttaattcaatgcattttctctgaataattcatgtttgttcgtttggtttttttataacatataactgatcagacatttttcttttttttcttttcttttctttctttttttttttttttttttttgagatggaatcctgctctgttgcccaggctggaatggagtggcgtgattttggctcactgcaatctccccctcctgggttcaagcaattctcctatcttagcctcccaagtagctgggattacaggtgtgtgccaccacacccagctaatttttttattttaatagaggcggggcttcaccatgttgaccaggctggtcttgaactcgtgaccttgtgatctgcccgccttggcctcccaaagtgctgggattacagacgtgagccactgcgcccaaccaggcatttttcaaccacagcagttttgacatttcgggctagatgaatttattttaggtatggacatttctgtgtatcacagaatgtttagcagcattcctagactttacctgcccatagcaccctgtgcagttgtgacaaccaaaaaatctctagatgtttctttttccccctaaatgtcacctggaggacaaaatcacccctgattgagaacccatgctgtctactcatgagactgtcatttaggatatcatcaactgaaaaaatgttaaaatgaaagtatatgtgcttcagttgtattcatcctgcagtatttttttgtgccttcagccaccttatcctattaaacattttccaaatgtaaggtacatatgtagccactatttttgtactggttctagacaatatattttattttgagttgagagatagcagccattttcagtcattttaaatttgattaagatttaatgagaagagaaaaaaggcatacattttcgtaaactaatttcagcagatgtgtggatgcttttatataaacctacattgaaaaagaaggtagcagttatcattaggacagaaagacataaagtcctatatttctgccattgtaagtatatgtacatcatacaggtctggaataaaaaaatgtaaagtgtttctatgacccttcgctaatcacagaggaccaaggaggagagaggaatggagactttggaacaggtcaagtgctgcacatagcataatatagcttccctagatggctctgtattaaaatctcagaattaagttattctgtcatcgactcattccgaaagaaatcatgcttgctcgtttctcatgtctacccttactgccttctgtggggcatccagatgtttcaaaggtctgaaatgtaacaattatgttgcaggaattgcagtggctttgtttcggggtagaacattccaggctgtgagtttctttggaaggcaggcttctgattaggtgttgccaaaggctctgcctaaacgtttgttttctgttgatggagtctaagagctgagtggttttattttcctagaaacagctgcttcctttcagttggctgaatcggaggatttattccccttttccactgcacacagagccttatgatgggcactgggatgtggaaggagtggtatcaaaggaaaagtcatcttgtctttcagtgtttagcgtcaacactggggtaaatctctaacgttgcattctggagtgctgtttaagagtgtttttattttctttgaattcaagcatactggaaagaaggggtacctggtggcccatattttattagcaacgtactgcagcctcccatcaggttcttgctaatgaaggtggcatggccccactgccccctgaatctgcaggaaagtggatatgagaggcagtattcaggaagattttgaaaaggatgttttcccttcatttctccagatgctgtaaaacttcatgctggatgatgccaggtcaggagagagctgtgtgcatggagtggattgcgttagttccctgctagaattgcttttattggattgcaatttggggtaatattaggagcccatctttaaggagatagtaagaaacaggcatgccttttgtgcctctttgaggaggtggtggggatatgtacatctcaggtcctctggcatggtgactataaatcctggcttccctgtgtttcagaacacctggatccaaatcccagctctgcttttttacctaagtattttttgactcctataagcatttgcttcctcatctataatatgagggaaataatagctcccacatcacgagttgtgaagctcccgataaagagagtgggttagtcacttacctgcactgaatgttcaaaaattgtcactatcctgcttgttacatgataaaacctccgtttgctccagccttaaggaataactgtgctaattttattggttatttattggtttattttcacaatataggtacctggaatggtggatatcaaccataagatttccttccatgccgattggtaggaaagccagcaggaaatgttggcctctacccagccaacatggagtgctttgaggtttgtgtgtgggtattaacttcattcctggcttcagtatgtttccaacccctgtttccatttctttacttttatcacctcttaacaagatagataaataaatctgttttatgctgctgtattgtgtttgtcaatatgaagcaaattaatcctttcttgacctgtggtggtggcaggggaataaattttatatatatatacatatatatatgtgtatatatatatatatatatatacatatatatatgtatatatatatatatacatatatatatatatatatgtgtatatatatatatatatatatatatatatatatatctcctctgaaatattgatcttctcttcttctttataacccctgaataacaggagccacaaactcaaacatctaagcagatagcatcaatgagaaaaatgggcccagtttaagacaatagggattagtgggtactgccataaatagacaggatattttccattctccaaccacacctccatatttcttcaccattgagtgtctcagttaccccgatgtccactcttcctttctcatcccatgtctttcaattcaacacagtattcttttgatccagtgcatgcttgtaaattttgctaaaactctacctattattcttttatttttttatttttgaagcaaaatagcatgttctgaggtagcctagaaatgtgtctgacacaaagcattctgtggggttagaagaacaactaataattatggaagtatcaacattaggaatagtggttgctgacatttattagtacttgctatgttctgcttaactatgttgcatgctttagatgatttttttgactttcaaccccaggagttaggtaatcttcttatctccattgttatcactaggaatatggagatgcaaggagacagagagactcactcgggccaaaatccagttgctcaacacttccacctgtcagcctcctgggcgtgacttccccaacgtggggaagatctgatgtgtgttttgtaggtattaccaccttcacctggaaataattcaccactctctaacttagatacttcctggtcatctttcgagactcagctctgggctatcaccagccttagaagccttcccttaccaccctttactggggcaggtgtcccctcctgtgtttcttggctcacaccaccacagacagagcacatacagtattatgagcaacttttggccctgtgctgctcttcctcccgtgactccatccatgactccttcctcccatgactccatccatggctctttccttccatggttccatccatggctccttccttccatgactccatccatggccactccctcccatgactccatccatggccccttccttccatgacccctccctcccatgagtccacccatggctctccttccttccatgactctatccatggttccatccatggctccttccttccatgactccatccatggctccttccttccatggctccatccatggatccttccttccatgactccatccatggctccttccttccatggctccatccatggctccttccttccatgactccatccatgggtccttccttccacggctccatccatggatccttccttccatgactccacccatggcttcttccttccatgactccacccatggctccttccttccatgactccatccatgactccatccatggctccttccttccatgactccatccatggctgcatcctttcatgactctatccatggtcccttccttccatggctccatccatggctccttccttccctggctctcttctttccatgtctcttttccttccataactctcttccttccacgtctctcttcctgccatgactccatccatggccccttccttccatggctccatccttccatgactccagtgccatattttgtaggcaaaaactcatggagagaaaaagaccctctgagaagcatctaccagggatgtacctagagatcgtcaagtgatacctgaacaataggggccacaaactcaactatctaagcaaatagcatcaatgagaaaaatgggcccagtttaagacaatagggattgatgggagctgccataaatagacatgatatttgactataggtggttcacagtttagcctttgcagttagactgctttaaagtggatccttgtgccttatttcactagctatgtgacctgggttaataatgagtctctctgtgtctcagttgccacatccacaaaatgaggaaaataattatgcctaccctaggggggtcctgagtagatataagatggtgttcataaagcccttagcacacagctttgcacctagaaggtgctcattaaattagttcctgttctccatgcttagtataacttctgtatgatgttcagcgttgctttggggcaacactgcaggcaattaaattgtctttctttaattgtcatttcttcctcttattccacaggtatgtattgtacaactactctaaagtggggcacaaaatagacaaagcccctgactttctttttttaattattatcatccttttaacttctgggatacatgtacagaacgtgcaagttcgttacataggtatacacatgccacagtggtttgctgcacccatcaacctgtcatctacattaggtatttgtcctaatgccatccctcctctagccccccaccccttgacaggccccggtgtgtgatgttccccttcctgtgtccatgtgttttcattattcaactcgtatttatgagtgaaaacatgcggtgtttggttttctgttcctgtgttagtttgctgagaatgatggtctacgcaaataaactagaaaatctacaagaaatggataaattcctggacacatacaccctcccaagactaaaccaggaagaagccgaatcccttaatagaccaataacaagttctgaaattgaggcagtaattaatagcctaccaaccaaaaaaaagcccaggaccagacggattcacagtagaattctaccagaggtgcgaagaggagctggtactgttccttctgaaactatttccaaacaatagaaaaagagggactcctccgtaactcattttatggaagcccctgactttctaagcttattggtttcactggtgttgtctgtaatggcagccatgagccccatgtgactgtttaaatttaaatgtaaaaattcagtgcctcactgggactagttacatttcaagtgcttactgaccacacagggccagaggctaccatactggatggcacggatatgtgagtttgctgaagctgccatagtaaaatgccacagactgtttggcttaagcaatagaaacttaattgtctctcagttctggaggccgaagtccaaatccaaggcgttggcatggttggtttgttctgaggctttcctgcttggttggtagatggccgtcttctctctgggttttcacatggtctttctgtgtctgtgtctttgtctttgtctcctcttcttgcaaaggcagcagtcatgttggatgagggcccaccctatgacctcgttttaactcagtcacctctttaaagaccttctttccaaatacacattctgatgtacagggggttaaggcttcaatatatgaatttgggagtggggcaagtatgccattcagcacatcacaacaggatagaaaatttttataattacagatggtggctcattcctgcaactgtagcactttgggaggtcaaggcaggtgaatctcttaagcccaggagtttaagaccagcctgggcaacatagcagaaccatatctctactaaaaatacaaaaattagctgggtgtggtggtatgtgcctgtggtcccagctatttgggaggctgaggagggaggatcacctgagcctggggagatcaagactgtggtgagctgagattgctccactgcactgtaatttatgtgactgagtgagacaccttctcaaaaacaaggaaacaaaaaatgaaaacaaacaaaaaacaccttaaacaaataaatgtccgtgttatttactaatactgaatatatacttaaaaccagcacttcacctacatgtgcattcttctgcctgggaggtgttgatagagtgaccttaggaaaatgtctttgtctgtggttcaaaaatgaattggacttgagtgagaagaggcacacatcttctctccccctccctccccttgcttcttcccatttccatgttccgtcccctattattctctcatactctatttctcctcatatacaggtttttttttttttttttttttttttttttttttttttttttgagttggcgtctcgccctgtcacccaggctggagtacagcggcacatctcggctcactgcaacctctgcctcccaggttcatgccattctcctgcctcagcctcccaagtagctgggactataggcacccactaccatgcctggctaatttttttttttttttttgtatttttagtagagacggggtttcactgtgttagccaggatggtctcaatctcctgacctcaggatccacccgccctggcctcccaaagtgctgggattacaggcgtgagccgccacgcctggcctaccaggtgtttttctaggccctattttagaagaggaagaaaagatttttaccctcaaggaatcttcagtctactggtgtctgagagacctgaacaacctaaccacgatgtattgccaaagctggtgagacagaagcaggggaaaaatgaaacaggatcccttggaagggagatgtcactcctgctctgcggtcgtgggaaaggctgcagagagaaggcatttcctctacacccaaccttgaccttcagcaagtcccttagcctcccgttgagtggcaggcaacatgtaaacagcagctatctcttagagggcaggagttctatgaatgcacttattaatcactgtgaagctgatgaaaacgatcaccataaaactatgacacactccttttcttttccaagaccagtagtgctgaaaggccttcttgtccgaggcttaccatatagacaggtacctcatatcaccatgaatatatgacgactttttaatcaagtgttaatggtctcctacacttcacaaagcaggaatggagggggtcgttgcagctggtaatgaccgtatttgcttttattgtatgattacctttattcaatctctagttccaaaaagggttttagatggcttataataaaggtgcagattcaataaaccatgagattattaaaagaaattacgtggtgagcctagtaatgaaataattggggggtggtaagaaaatattcacagaaatcttaagatttcattttttccaattgattaagaatcttagactaaagctagccactggaactgagcacaaagcttatatctaaggattctgataaaatgcaaagaaaagaagaaagaaaaaaagaaacaaagattatatgtctttatatgtcgagctatattgctttcttctttcaacaataatttatttagcacctactctgttgctggggttttgatagatgctggggagtggagggagaaagatataaatactattaagaccaagtcctttcagatagaagaattatgtatttctgtaaaagagaattgtgtatttttagaaaagaacatggattagtgtgtgtgtatgtgtgtgcgtgtgtaagagtgtgcatctattcaagctttgtttttccccctagatatgggtgtctcaccctgtcttccaggctggagtgcattggcatggtcatagcttactgctgttctgaagttctgggctcaagcaatattcccatctcagcctctagagtggctgcgattattcaagtttatcattgatgattgggaagagccacagtcaatgaacctagagaccagataacttagggccctgttaaggcaagttaaggagtttagcttttactttaaggacaattgggaaccattgaagtggatcaaattttctatttagaaagataactctccctgcagtgtggagaatggattgcggtggaaggagagaggagaggaacatcagttagagggcggttgcaggctgatgggcactttgggtgggaataatggctatgggaatgaagacaactgaatggatccgtgagacacagagcaagataaactatttaacttgtagatcaattgtacatgaagaatgaagttatgagaggaagcaacgtggactcaagtttcattctggtaccttctagttggattcatgtaccatttaatgagatggcagaattagaaaaaagagaaagtattgggtcttagtgagaagatgatgtattaacttgtaggtatgatgtctgagatgtttggaagacacttaggagaagatagatgttaagtaggcagctgagtataagaatctcacactgagaagtgagaggggattggtgatttgggagccttggagtataaacaggttttaagccatgggaattgatggagtcctctaggtagagtttaaagaatgaaaagaaaagaaaatccaagacgtctttggaccccaaacattgagacgtttcccagaggagaaaggatttataagacagtctaagcaccagtagctagagatgtcagaaaatcagcaggaaatagtggtgttatggaagcaaaaggaaaactacgtattacagagcctgtgatggagtggccatagggtcccttgccaatggaagccatggcattggatgatagactcaagaagtactcagagtgagagaagatgagagcccaggacacatctctgggcccttgtgttattttctggtgactgtgaatttccggaagtccccccccccgcaatagctttgatttgacatggagagaagtgtgccttccatgatacactgtgaattactgactaccgttccaggcatcttaactataactttaatcatctgagctctagctcccatcaccattcctgcagtgccccaggactcattaaatcgccaggggtattcgaagacctcccaattaaggacccgttttatgagcatagttgaaatcctggaaattattgcctctttgaggcacaggagtaggtgctggtatctgctaggatgaatgataatgtggaccccggtgatttgctgtccttcatcgtttgatctgctttaatgaccagagagtaattagtccgttgttgtgtgcagctaggtgttacaaatggagttgtaaattcagcgccttggaataaaaagtggctattagtttctcccctgcaattcagtttacagatagttctggggcaaagtgagaagaagcccagtgtgccctttcaggggtgacatggtggtcacgtacatgtgcaaacagatgcgtgtgcacacacatacataggtttgtgttctcaaaactgaaaaaaaaaagaatctctttgatgtaatttctttgtagcatgtttttaaatgaagatattgaagctgatggcatccagggctggggaagtttgaagaagggaacagaaaattttgcaattggatttccagcagtaactgtgtgcaaacacggcccctccctgtatagcagaactctgtgttatcctgagctctggaagttcgtctgcagcatgaagttttttaccttgctggcatcactcaggaccacagagggagcatgcctgctggttaaggatctgtgggactacctgtgttctcagtctggctgtactatttactattggtttcaccttggaaaagacacttaatgcctctaaggcttcatttctccatctattaatgaagatagccgtagaaccagactcattgatttattagaagactcaaatgagaacattcacggaaagagcttgccatgacaccagagatataccaggtgctaaataagttgcttattattctcacatcttcatcacagtaaacaacttggagaatacagacaaaccaggcatcaaccattggtgtttcagagcaagagaataactgacatccagtatcgtttcctaagttgatcaaactcttcctgaccatgtggcgatatatgcagaggcccctcaaaccacagggaaaacaaggtaaagtggccagtgctatgctcatttgacctaggagtaaggaatgaaaaacggtatctgtgttaaagcaattacagatatacgacagagttgcatgtaaaatgcatgtggatttctaggacaaacacatcatatcaaatgcatcttgcccttgcaatacttgattccagttgtgtttcccagaattactggagggttaggtcactctcctctggggacagctgattttctccacaaaactggtgattaggaggactgtggaaatgtgcccacacttcccagtaagcatttcttcttgtgctttattgaagattccactagaaattaagtgctttggaaattgaagttttgaaatcagcacattttcagccaagcctggtggctcacgcctgtaatcccagcactttgggaggccaaggtgggtggatcccgaggtcagcagatcgagaccatcctggctaacacagtgaaaccccgtctctactaaaactacaaaaaaattagccggccatggtggcgggtgcctgtagtcccagctacttgggaggctgaggcaggagaatggcgtgaacccgggaggcagaggttgcagtgagccgagatggcgccactgcactccagcctgggcgacagagggcgaaatcagcaagttttctttattcaggatactcactcggcttaccatgccatcctttcaaaagagttttaattttatttctcctctctgcatcccctcagtatgaatttaggtacaccaagaatttatcaagcttcaaaataatctaaactatttgaaatggaagacacctaagaaagaaaatcgctttagagctgatcagtcactgacctctatatctcatctcaaagattttcttttaattaccctatatctcatgcttctgatatctttaaagattaataaggcatccatatatccaaacaatatagatatatggaatatagaaaataccaatgtctttagagtcaatacttaaaaaatcttgctcttgccgggcacagtggctcatgactgtaatcccagcactttgggaggctgaggtgggcggatcacctgagattgggagtttgagaccagcctggccaacatggagaaactgagaaaccctgtctctacataagatacaaaattagctggatgtggtggcgaatgcctgtaatcccagctacttgggaggctgaggcaggagaatagcttgaacctgagaggcggaggttgtggtgagctgagatagtgccattgcactccagcccgggcaacaagagtgaaactccatctcaaaaaaaaaaaaaaaaaaaaaaaaaaaaaaaaaaaaaaaaaaaattcttgctctttctcatgaatagctgcccaatattctgtaatgtaggttatattagattgcttggggctgccataatacagcattgcagacttggcagcttaagtaacagaagtttattttctcatagttctggaggctggacatccaagattaaggtgtcagcaggattggttccattggttctctctccttggcttgtacgtggccatcttttccctgtgtttttccctgtgtgtgtgactgtgtcctaatctcttcttataagaacactggtcatagtggacaacctataggatgagagaaaatttttgcaatctatccgtctgacaaaggtctaatatccagaatctacaaggaacttaaggaaatttacaagaaaaaaaacaccccatagaaaagtgggcaaaggctatgaacagacacttctcaaaaaaaaaacatacatgcggccaaacatatgagaaaaagctcaacatcagcgatcattagagagatgcaaatcaaaaccacaatgagataccatctcacaccagtcagaatggcgattattaaaaagttaagaaacaacagatgctggtgagcttgtagataaataggaacacttttacactgttagtgggaatgtaaattcattcaaccattgtggaagacagtgtggtgattccttaaaggtttagaaccaaaaataccatttgctgcagcaatcccattactgggtatatagccaaaggaatataaatcattctattataaagatacatgcacgtatatgttaatagaagcactattcagaataccaaaaaaaaaaaaaagtggaatcaacctaaatgcccatcaatgatagactggataaagaaaatgtaatacatgtacaccatggaatactatgcagccataaaaaggactgagatcatgtcctttgcaaggtcatggatgaaactggaagccattaccttagcaaactaaagcaagaacagaaaaccaaacactgcatgctctcacttataagtgggagctgaacaatgagaacagatagacacagagaggggaacaacactcactagagcctgttgggagagggtggggggaagaaagcattagggaaaagaatgaatgcatgctgggcttagtacctaggtgatgaggctgataggtgcagcagcccatcatggcacgcatttacctatgtagtgcacccacacatcctgcacatgtatcccagaacttaaaaaaattaattaaattttaaaaaaagaacactggtcatagtggattagagcctacccttatggattccttttaacttaattaactcgttaaagaccttatctccaaataagggcacattctgaggtttgagggattaagacttcaacgtatgaattttgagggctactatcagcccatgacttaggtgtatgtaatttatttaactatattcccatccatgatctttcaggctaattttacttgttttgtatttcttcacattaaacaatgtcatatcaactaatccaaccataacacttgtgtggctggataaaacagaaatgttttattgtgatgtggaattttaactttgtcttttttgttcaaactaagaatggcttatgtctccccatagggataacatgattttgttttgacagaaatctttaatggaagattattttttttctcagtggcaatctgcagattaatgggataattttaggtgaactgaagagaatggagggctgttctgtttaagctatctttgtgcttatgtagggacagtaatatcatccaataaaaggacatatgcaattatatcagctttgtggtaattatatggatattttcattgttcagtacatttaattatgctttgttaaacagcctgtattagcttttggtggggcaagctttgactggattaatgccaggggcttgtatgttgaatgtttcacacgatgcatctttctagaaggaaagagcaaacaaaaattaagaaaaagggtcatgattacctttcccttatttttccttttcaacaacatttttaatggacagttccagagacaatttcatcctttataaaatccttatattagtcatttgaaagaaaagcaactaatatatggttttggaaccgttaacccaacacagaactctttagagttaatgtgtggcctcctccccatctaccttcgcagtcctccagtctcactctgggaggggcagaatttccattgacagcctgatgcatgctcttctgtatggtcccctttgctgatacaattatccatgtgcatgcttatgctttttaaagggtggcctcatcctccgccttttattcagtaacttgccttttttgcaaggcatggttattgtccacacatgccaattattaaaaatctacttactccttttacatatctgcatagtattccatagtatggatgcgtcactatttgttcagccatccttccactgatgttctttagattaattcttcgttggatttgtgtatttttttcttctgccaaaataagcattgctataagaaacatttggcacgtatttctttcattttggtactttctgttggctaaaattctctgaaatgaaataattagtaaaagctcaccaattttttaatttcaacaaatattaccatgtttttaccccccaccgccccccacacacaaaattggagcaatttgaagtcttcccgacgctataaactacctgaacaacactggatgttagcaatcttttaaaaagtattgagtatacacatggcacattgttgctttaattttcatgttcttgacgactaattatacacaaaatctttcctcttataggaattatttaggtacaatatttgttcattttcaattagtttatctttttcttgttaatctattaattcttcgtatcttaaagctgttcaccttagcttgtgaaacttgtgataaacacatgctgtgatttaccttttgagtttatctacaagatcctagtccacttaaaagtactttgtgatcacttttattaataacttaaggagctatccttcccctattcaacttttataaaaacagcctcttgtaatactttatagttttttgctttatctttaggtgtttaaatttacctggaatttacttttgcaaagctaagtatgaaatctaacatgcattatttttcctgtaaagggtagtcagatggcctaatgacaacattaattccatattccaccctttctgttaactcggatgtgtgcatatactcacacagatcacaatttctgaactctattaactcaggtcaactatttatttgctgttgtgtattaaagagttttgcctactaatatattttagccttggcaggatgctatgagatgacatagtaacgataagaattccttactttaaaagttgggcaggtaacatttggggtcagaagctttttgaactgatgaactagttagatttgatggggggtcggggcggagtgtaagtggcagaaatctgacccaagctgatgcaagcaagaaggaagagtattgactttcagacaggaaaaccaagggttgctctaagcttactgaattcagaagctcaaccaatgtcgtgagcaccggtctcgttcaccatgtcatttagctctcttacagccatgtttagcttggctccgccattatacagcagaaagatgcttactaaccgccccaagtttcatcttattccctgaacagcaccagcaaagcacactgaatcacgtgcccatcactaaacaatccccactgttagaaggaggtgagttcctcactggctagactagctctcgcgcccaccatgacctaggaggtgtaatcaatcctgcaggaaccacccagcttgatagtttatcctcccagagaggaggagagccactaagaaaaaatcaaatgctgttaccagaaagaggggctgaccatttgataggctaaaactagtgaatttcactgttcctgattaatgtgaatcaaattttcatgttagttccgaaaattttatcccactgggatgaaggcaactttttcatcgaaatgtgggccacatttaattcctgcatgtaaatgttggtatccagagaaaaacaaattaagataacaatgagatgcgatctttacaacttgaattggcaaagattaacaagttgctaatagccattttggtactactgtgagtaaaacaaaaaaaatcatatattaatggttggagtgcaaactggaataatctttgaagagctgcttttacgaaaagatatacagcttttatcagcaatgcttttttaatgaattaactccatagcaaaaatattttcaattggtttgaaaatagctacgccaatacacaaaagtatgcttgtgaaagtcttggatgacagcaacaacaagcgttgtttgtaataacgaagtcctaccctgatctaatgcatactagtagtgagctgattataaaattgctgtctagttatgcatttgcctgacatttgaagaaaggacaattataccttttaaattaataccattgtttaaatgaaaagaaaacagctacttaatgaagatttagccctaacatcgctgctatagttaattcttcgcaatgattcaccctagagtggtcaggtcacctctcttgtgctttgattacaccttccatatggattacggatcatatgcaaaacatttaattactgagctacagcattaatcacttggctgaatgtatttcaccttttctccttcctgcaatgtttaagccaagttaactgatagcagtgcgttaaaaacaggtagtactatacagcagtaggagaatgtagcctccagcacagagatcccgggggcaattctggagctatcatttattagctctgttgccctcgggcaaatcacttactagctcaggtgagtctgtatcttcttttgtaacatggtcataataaacacagtttctcatatctagcctgattatcgtgaattgtccacacagtatatataagccctgaagccctggacacaaatgtgtaaacattgttcttatggaactgctgattattattattaatctccattttcttgtttctgtgcgatcaggtttttacccatgcaaagtggttgtctaagactatatagatgtgtagagagaggcagagtaggttatttggaaaaagaaagtggtggagtgaggttttgttgttgttattgttgttaattattttatttcatagggagaaggagggcactctccgtgtaccttcgtaaagaatagtacatactctttattttgacagtgtagggtaaacctgtaagagtcaagaaaataacagatttgatactaccctttagtggctatcttgcatgttaatgtatatcctttcatttctgtctgagttcagcagttagactcagctcgtgggttcctacagctcaatttctaaaatctacgtaagaagtaaaatgctgctaagtttacctgcacttttagtgtacattcagatcagagtcttctcagttatagatgtatagggctgtgtgtgtgtgtgtgtgtgtgtgtgtgtgtgtgtgtgtatttatgtccttaaattaagcgctattggagcatggccctgcatatttgtttctgtattgcctgtggtcatttttgtgctaaaagggaagaattgaggagttgcaacagagaccatgtggtccaaaatatttactatatggctctttgcaggacaaaagaaatgctaactgttgatttaggctacagtttactttaagtcactgttacatcaatgaaaaacttggaaactaaatacatttgtgtgtttgtgtgtgtgtgtgtgtgttctttaaacttttaagctaatccttagtttaaccaaaaagaaagactgggtgtcgtggctcatgcctgtaatcctagcatattgagaggctgaggtgggtggatcacttgaggtcacgagtttgagaccagcctggtcaacatggtgaaaccccatctctactaaaaatatgaaaattagccaggtgtggtggtgggcacctgtaatcccagctacttgggaggctgaggcagaagaatcgcttgaacccgggaggcagaggttgcaagtgagctgaggttgcaccactgcactccagcctgggcgacagattaaaactctatctcaaaaaaaaaaaaaaggattaaggattaaaaaaaattgaaatcatccatggttataatattcttgactgcatcttaacatcattggtttgtttttcaaatattgttaaatgcttactatattccagttatggtgcgaggtactttcccatatgttatttagttttagaatcctctcagccaccacctgaagtagttgctattaaacccattttagaggtgaggaaacagatgttcaggaggatttaaataacttgccacgtttcttgaaacttcccagagccagaattcaaccttagatatgtatgaattcaatctgatgcttgctgggttaagaccattggagacaccctctctcctctgtccttttgacaattccatgggcagaatatcacaggaatggcaaatagagggataaagaatgtatgtgacatgcacccaaagagtctccaggccccttttcatcctttcaatcatgtttctaaggtattttgaactaggcgaggctctcttagttcgaataatagcatgctgttcaatgtggacattaatagtcagaatctggtagtgcagctacagaagaagcaaagaaaaaaatgaaatcctctcattgatttctagtcagagaggtgcagaaaccctaagagtccttatgtgagaataagtgttttctctctgtgtcaatcttaatataactaaatgcagcagatttaatcctttctataatttaataatttgtattaattacacttaatgaaatataaattaattacatttaatgaaatataataaagtttatttaatatattaattacgtgtaatgtaacatatgggattttatttaatatactaaccatttaatgtaatataataaaatttacttaatatatgaattacagttagtgtaatataataaagtttacttaatatattagttacagttaatgtaatataaagtttacttaatatattaattgcagttaatgtaatataataaagttttcttaatatattaattacagttaatgtaatataaagcttacttaatccatatttaataaattgaattccattaatatgtattatgtgggttaacatacatacagtgttgtaacaacaccaggaccttagtttacattaaaatagtgcttatttttatagtattgttattttaataattatttatgttactgttaaataagttgacatatatttatgtccaggcaaggtgactttatagtagctgggttttccaaagtgccatatttatatcccctagaagtatactatgctgagacaggagttcttagctgtagaataaagagagctggttttgtagaacattaattttgctccaagcttttggaggaaaaatgttgtttcctattaaaaggaaacaaatatacaggaaatagacagctaatgtgcatgcagtttttaagagaaagcccgagactgcagtcatcctgtgtgatatgccactggactcttccatctatggctctggagcccctaagggtaaggattagacctcatctgccattagctagcggtacttaagtgggaaattttgcaaagcagtaaattataacactactcaaaagtggtttctatttttgtaatattatgatgtaaagttactgagtttgataatgcaatctacatccctttgttgaaactgtagaatatggccaataaagggttaatgggaaaatcccagaatctgctttctttttaatgtttctaatggtcatcttagcaccagagcctctttgagagttaagagaaagaaattaccagagaaggagagtctgtgtctcctgggagatggatggtttgggggaatacggagtggggatggtgatttttctctgcacagaaatactttcttgaagtcagccctttactgtgcaatgtgggatagaattctaacacctccagtataatggcaggaggaggaatggttaggaacattggagagctatttggcctatgtctctttgttatgaagggcccacagtttacgtttttgactttttcaccaaataaaggcttatagcaagttacccagatatgttggcagaatggcaaggctacattcatcatagaactttaagcttgtgccccactgctgggccatactgcctgtcaggcccaaattaatatcttttataagccccgcaacgatgttgtaaagaatacaattatagcttaggacattgccatctgtggtgggacatttcaaacagaattaagtctagagattatgagtgatgcatcattgtcactcaaactgaaattggtatagcaccttctgttttattcaaaattctaaagggaaattattctgccacaaaaattctcatctgttaagtagcccttaaatgactttttttttttgcctttgcaaaaacaaataaaaccattttatttgtgtgtgagttagaacattgaaatgttgagcctagatttttaaatgtgtcgtgatttttgcttctcttgctcagtcctcttttctacttctttctgccttttttatttctaattttattttattattttttagtcttttattttaagttcagtggtacatatgcaggtttgtaacataggtaaacttgtgtcatgggggttcattgtacagattatttcatcacccaggtattaagcctagtacctacccactagttatttttcttcatcctctccctccttccaccctccaccctcagatagggcccattgtgtgttgtttccctaccttttcttaggaaccagaagccccaggcattggaagtggtcaaggcatttttttctttgacccctgggaaggtcttttcttagtacacaagcaacaagaacttcagacagagagtatatgatgctgcattacaacctgaaccattggagttctgtcaaaagaatattgaagagatcctggtagaaaagaaaatagagtcaagaaaaaagaaagtgcagagtaaaatatagagaagtagagggaaaataatgtaatgctgccaaacctaataagagtactgaaattgttgcctctcacaagccagtgactttctcaagttacaaccaaggtatgggattcaaatgatcccactgacaatccctctggaaagtctccagttgaagcctaccctatcatttctttaagagacccacatagacaagttttctccaggtctgagctggatttccttcgttgattgagcaccagatgaggaattggcgtgattttaagggccacgtgcactatgcgaaaaagagttagctttgaaaacaagacaaatacggggtgagacgagatgcaaatgctcggaggtatctcagcactcaagaacaaatgcatgttcacatctcctgtgttaggcttgctcactgctttgatagccggtggaatcactggcaacgttcacattttttcctcctcctgttttcttacctcctcatgttttagttgaatgcatgtaacttgagtaagattaaaaagtgattctcagaatcggaactttgagcttcctgcaaaaggaatatttaagcatctctgtatccaagagtaccatcttatctcacgggctcactaagtgggagttaggaatcctacagttcccttcaagacctatagggcagtagatttgaaccttacaatcctatattgtatttcatgttgaccaatctgtaagcaggtaaagaactgccatcttactggtgataaagagtttatgatgttaactgagctctcattctagacaacaaagtaatccagtgtcctattcaaacttaattcatagttatcaaacagtcattaagtatctactttgtgcctgatagacatttctttaaccagaatgctttgccactgtatcctcattcatttaaaatagagtatatagaaaccagatttagatactgcctctagttgaaattcctgcatccaggtagggctggctgtttgtcttagagaatatgtccctttatgtcctgtctggataggtggaaggtgagtaggtttaacaagtaacatttgatccaggcatttttacagtaacagtttgttattgctggaatttgaccatctcaattcattttcgtaggtataaactagtcatggatattaaatgtgtgactatattgatatatgaaagcttactgatggcacagttttatcatcagtgcctttattcaaatgagttttaaaagttgattagcaactgcattctcctatgttggcttggacatgaatagtgcaaatatgtcagtctttctattcttccaagatgaccttcagctctctatgtgcatgaattccagttggcctttagccactcctccaagtagaacacatatctatccagttgcctcttgtgtaactctttctggagcttccatagcccctacccaacttgatgtggtcaaaatgagcctcttatctttcccaggtatttgtctgatgcccctgaacctggtcatcgataccaccatttagtcaataacttgtaacagtgatctaggagttggccttgactttttggcttcttttacacttgtttttatcctttttttaacacctccagttatacatgtcttctagtgtttctttcagtgagtcttgtcaattctatttatcaaatatttaccaaatcctcttttccattataccgttactgctgtgtctttgtgcaaaccctcatcatcttttaggctaagatacaataaaataatcttccagaggctcttcctgcttccagtgttcctttctgcacacacgagggtagccttcctagcaatgactgttccattttcttatagaggaattaaatctaaatttcttggcatgacacatgggcccctttatcatcttacctgtgccccctttccctgcctggtcttcagacatcaaccctttccatcagttcacccagtcacatctctgcacctttgcataagctgtttcctatggtttgaatgcctttctcccctgactatcgaacaacctgctatgcatccttggagatccaactcaagcatcatcaccttttgaattctctgaaagatgccctttgcctttagttagaacaagaggcatcctctaccaagtagatgcatagcacaatttattccattctgtcatctagtacgataattatactactagtttctattataatacttgtttgttattttccttctccagtaaacgtattctactttgcattctccaggcctaaaagagttctggaatgcaatgggcattcatgtaagtaatgttaaaagaatgactccatcaattatatttctgtgacattctcaggtaggaagatatctttatgcttataattggaaaaaaaaaaaaaaaacctctagtggcagagaatttgtatttctgttagctctcagtattgggattgtatttctgacaggctggcccaccagctatgcttcatgaaagaccatgagccacagggaagaggtttattcatctcagcattggggtattttgcttttcttcaaggcaaagggatctggagactcctttgcaggctggccatgtcttgtgcaatcccagctgtgtctggagattctagcagggatgcagagtgtggttgggacttcacaggaagtcgacttgcatcagaagcacatagggaaagggaagggaaatagaatgaaggaagaaagctttcagcagccaaggcaacaacttcccccgtctctgtctggctctggggccaaacagactcctgatttctctttatctccttgtctctccacctctattcctctgagttcttttcccatcaccccccattctttctctatatactgtttcgctgactagtcatcagactctaccgacaaatttacctgatcttcccagcctagcccttgagcttaaccattccatccacttctcaattccacatttcttggagagaatctgatttgaccaggtaggggcatgtgtctgacccaggtccctggacaagggaccgatgaaggccaggctgtgagagaagcagtgtctctaagaaaccctgcagcgttagggagaaatgattggtatctctatggtacacgtggtggagatgctggctgcacatcccaagagccatccctagaagatggcttccttcccatcctgtaaaccctgagtcagggatgcccccaagcatgtgagatgttgaccctatttctgcacttggcccaagtcaaatccagtcattgctattgggggtcttgttgcatcctgttgtttcctttgggaggtgacatactgctgacatctgtggagtgaagggatttggggaaagtgtgagtcatcatctctctgatgacattttattctcttattctccaaactctgcccagcttctttcttttttctttctttcttttttttttttcaatggaatctcactttgttgcccaggctggagtgcagtggcgcaatcttggctcactgcaacctccgcctcccggttcaagtgattctcctgtctcagcctcctgagtagttgggattacaggcgtgcgccaccatgcccagctgttttttttgtgtttttagtagagatggggttttaccgtgttgtccaggctggtctcgaactcccaaccttatttgatccacccacctcggcctcccaaagtgctgggattataggcgtaaaccactgtgcccggcccagtttcttatttaggaccctcaaggaagaattgttgtaaggaagatagcatgatcatatagggatatctccaggtgaaactcttccacctttacaagatgtatgctggtataacagagaggaacacccatgattacctatgtacctctccctatgtacccctagtcttctgcccggggaccccaggatgccctgcaacacatggaaataaaatttacctcctgactcttggctctcacagctcttatcctgaatctttgttttctagccctgcctacttatctattttgttttctggtgattagtgaacatggatcaccctccgaggctttttgttggcagggtacatgtctgtctcatttttgtagttctgtagtacaaatcagacagcaagtgctcaattaatccttgaacgaaacaaaagaaaggagtcagttcatgcaataatggatgctgacaaccctagcatcttatcgaaggtatgtatctccactgactcacccccatttcatcacaaggctatttcccacccaacagttgcaaaaatctgtcatctccttgtttcttatctgtctccctcactagaacataagctacatgagggctcttgttttgttaatcctgttgacaaaaaacatagcttctgttatttttatttggttggtctttattgaagaaataaagaccaaccaaataaaaataaacagaggctatttattcagagcttgctatagcaaggagtcagacatcctcacttgcattttgccagaaactcaaaggcaggcagaggagtaggaaaattttatagtagataaataaagggacagcttcagatatggcctggctagaggctgtttgcgtggggaagctgcagatgggctaagtagaaaggggtgttccttgtgatcggttaaggtgcacacttggctttctctgattggtccgaagttggaggtgtggacaaaaattaggaaagctgtcagttacgaatctagtcctgattgtttctgagccagtggatttttgtttggcttcctggaccagttactagagatagtaatctgacttccttgaatcgtgacttgtggatagcaggctggcttcctgtagacaataagctggtttcctgggctggttactgcaaactgtgggtcagatttctctttttctatatggtcttgccagtgtccatttgtgtatgcagtctatccttgatgggagggaaaattaaaaaggaaggaaagaagggagggaaaaggatggggacatcatagtactattatccagtttttattatccagattctatttcgaacactttaatcccatttcgatgtgagggaatagtaattcatcccagagcggacgtgacatctgttttcaggaccctttaatcatatcccgtggtccaaagctataacacagtgaagaggaaaaagactcttttcctgtcagtcgcccaaacgggagccaaaggcttttgaggaggcacttaaagaattttcactttgcaattgtgcagaagctgttgttcaggtaatttaacattgattttagtttaaaaggcaattaagacaaaatgggcagccaccagccacttatgttaaataagcttagatttaaattgctcctcatcaccacctttgttttctatgtctgggctgttctatgctactttagcatgggatggtgtggtgccccaagtggggcaggtggataggcgagggaacccagccagggaaacggttattgaaagagaaagaagttggccaaaaattgttctcagtggtgagatgagttccctttcatactgctgctgggaatatggattcatgtaagcttctagaattctggttccttagatctaaaaacttaaatacggtgcccacttttttgactcatcggtttcacttttaggtatctaccctgagataaggcacagagaaaaatatcataacatcaggaagtgatgttcactgcagtgttatttaacataaagagaaagtgtgtagcattagagtggaatacataaactgaccttgtacattttttgtccttacagcacaaagtgttcatgatacattgcaaagtgcaaaagatgaaggcagcttatacagtaacatcccaattgtgtgcttataatgttttagttctatatgcagtagaaaatgtctgaagtggatagacttccaacaaaatagtacttggagctctctttgggtggtgaaataatgttagcttttctggtgctttttgaaatttcctaaactttccacaataaacactcataggttttataattataaaacacattgaaaacaatgttggttgtaatactattagaagaatattcctgtcagcagtgtgcttgattcctgccatctcaaggatgaggctatatgtgcatgctaagttataaggagatggaatggatattcggttgcaataattctgtttcttgcttaaaggaagtctgctacgcttcaggaatgagggtcattcacctggtctttgtttaaatttgtaaggtgaaccattttgtagacaatgcttggaaaatatgcccaggtgattcatgcatttgtctattagaaaacgtggtcacttaccagcaaccaatatagagctaatgggattcatttagaaatgtaaccacaagtccactataaatcgtatgttctcccatctcaatatgcttcattaagctcacctttcttaatgtaactggattattaggtgtcaggacaaagaaaatcagtaggtcctagtgttctaatcctgcaaactttcaatgtggttgctatgtaattttatttttttaggtggagcttgctttgtgcttttctacaggaaaatattttcaaactggtaaagaagtaatattactgtattgtgaggaatatttcaataggtcattaccataacttctagcagaaaggataatctacgtcgcattttacttcaaggataagattgatttttataaaaatctttagtgcattgaggcttaacgtctttttttccccctatgaagaagcaattagatgctggagttttccagaaatgttaggtgggcataaaccaaaccttgatgcttttctttttgaaggttttatcatccagcgtttgaagagaacaggcagttcccaggtgaaaaaaaatgttattggtacaatgtcagtcatcgacactcacatggccagggacgccacccttttcttatatttacatctgtttgaaaaatagagaaatacaggaaatgacaaagaagaaaataataagcacctataatctcactagcaaatactacccattttgtatgatttcttccaggggtgtgtgtctacaaatatccgtagagacatacacatacactttaaaaaaatagtaaatacacatcttgtacacttaaagcaagacctatagatgtacaggcacaccttggagatactgtaggttcagttacaagccactgcaatacagtaaatatcataatagagggagtcacactattttttgtttcccagcgcatataaaagctgtgcttttgtaccatactgtagtctattaagtgtgcaatagcattgtatctaaaaaacgacgtgcataccttaatttaaaaagactttattgctaaaataaaaatgccaacaatcatctgagcctttaatgagttctaatctttttgctggtggagggtcttgcctcggtgttgatggctttgtactggtcagggtggtagttgtggtagttgctgaaggttggggtgactgtggcaatctcttaaaatgaggaaacagtgaagtttatcacatggattgattcttcctttcatgaaatacttctctgcagcacctgatgctgtttgacagcattttacctaacgtagaacttctttcagaattggagtgaatcctttcaaactttgctactgcttaatcaactaagtgtatgtaatattctacattctttgttgtcattgcaacaaggatcatagtatctttactagatgtagattccatctcaaggaaccactttttctgctgatccataagaagaaactcctcatctgttaaagttttatcacgagattgcagcaatgtagttgcctcttcaggctccacttgtaattctagttctttagctatttcctccacatttccaggttcttcctccactgaagtcttgaacccttcaaaatcattcttgagagttggaatcaacttattccaaactcctgttaatgttgctattttgacctccttccatgaatcttgaatgttcttaatggcatctcaaaagcgaatattttttagaatatttcagtgtactttgcccagaaccatcagaagaatccgtgtttatggcagctataaccttatgagatatatttcctaaataataagactggaaatcaaaattattccttgatccattggctgcaggaacctatattgcattaacaggcacgaacagaacacttatgtccttgtgcttctccatcagagctttccggtgaccagatgtgttgtcaatgagcagtaatatttttaaaggaatccttttttctgaatagtaggtgttaatagtgggcttaaaatattcagcaaaccatgctataaacagatgtcctgtttcatttctagagcataggcagagtagatttagagttattcttaagggccctaggagattcaaaatggtaaatgagccttgctttcaatttaaagttaccagctgtattagcccctaataagagcgtcagcttgtcctttgaagctttaaagccaggtgttgacttctttctatgaaagttatagataccatcttcttccaagagaagactgttttgtctacactgaaaatctgtcatttagtgtagccaccttcgtcagtgatcttagctagattttcagggtaagttgctgcagcttctccatcagcacttgccatttcaccttccacttgcatgttacagatactcctccttgccttcaacctcatgaaccaacctctgctagcttcacactttttttttgtcagttttcccacctctctctgcctccatagaattcaagaggattaaagtcttgatctggattaggctttggcttaagagaatgttgtggctggtttgatcttccatctaaaccactaatactccacaccagcaacaaggctcttttacttattagtagtgtgttcaagggagtagcacttttactttcctttaataactttttcatcacattcacaacttggctagttggtgcaggagcctagcttttagcctgtcccagcttttttttttttttttgagacggagtctctagctgtcacctgggctggagtgcagtggcgtgatctcagcttactgcaacctccgcctcccaggttcaagcgattctcctgcctcagcctcccaagtagctgggattacaggtacctgccactacacccagctaatatatatatatatatatatatatatatatatatatatatattttttttttttttttttgtatttttagtagagacagggtttcaccatgttggcgaggctgttctggaactcctgaccttgtgattcacttgccttggcctcccaaaatgctgggattacaggcgctgtcccagctttaaaagtgtcttcgtcatgaagcttaatcatttctagcttttgatttaaagtgagaggtgtgtggctcttcctttcacctgaacacttagaggctattgtaaggttatttattggtctaatttcaagattgttgtgccttaaggaatgggaaggccaaggagagggagcgagcagggggaatggcctgtcagtggaacagtcagaacacacacaatctttatcaattaagtgtgccatcttatatgggcacagtttttggcaccccaaaacaattataatagtaccatcaaacattgctcatcacagatcacagtaacagatctagcaataatgaaaaggtttgatatattgtgagatttacccaaatgtgatacaaaaacataaagtgagcacttgctactgaaaaaaagtggcaccaatagacttgctcagcacaaggttgccacaaaacttcaatttgtacaaaatgcaatatctgcaaagcatgataaagtgaaagacaataaaatgaggtatgcctgtgtgtgtgtgtgtttgtgtgtaagcgtgtatacaactttaaaagtttcatactgtattagtccgttctaacactgctataaagacatacctgagactgcgtagtttataaagaaaagaagtttaattgactcacagttctggaggcctcaggaaactttcaattatggcggaagaggaagtagacacatcttacatggcggcaggtgagagagagccagaaagatcagggaactgccttataaaaccatcagatctcaggacgctgaggcaggcagatctcttgaggacaggagttaaaggccagcctggccaacatggtgaaaccctgtctctactaaaaatacaaaatttagcccggcatggtggcacacacctgtagtcccagctactcgggaggctgaggcaggaaaatcacttgaatctgggaagcagaagttgcagtgagctgagatcatgccactgtactctaccctgggtgatagaacgagatgctgtctcaaaaaagaaaaagaaaagaaaaccatgaaaccatcagatctcatgggaactcacccactatcatgagaacagcatggaggaaactgcccccatgatccaatcacctcccacctggtttctccccttgacacatgggaattatggcctcttacagaaaaaagttcaccaatcaccagtctaggccaggcacggtggctcatgcctgtaatcccagcactttgggaggccgaggcaggcagatcatttgaggtcaggagcttgagaccagcctgaccaacatggtgaaaccccatctctactaaaaatacaaaaaattagttgggcatggtggcgggtacctatgatctcagctactcgggaggctgaggcacaagaattgcttaaacccaggggcagaggttgcagtgagctgagatcgtgccactgccctccaggctgggagacagagcaagactccacctcgaaaaaaaaaaaaaaaaaatcactggtctagaaaaatgggactgaaattcacaatagtgtcatctctaggaaaagaggaaggagactagtttttacctgagtttgagagctccttttgttcttttaagagaacacttatgtactggctttatgcttttaaaagtgatacacatgtacacacatataacatatagagtatatatacatacacacttttcacttaaaacaagttatatgtatacatgttatatgcatgtaaagggccagagagtaaacattttagacttcctgggccacttggtctctcacagacactaaactccgcatttgcagatgaaggcagtcgtagcaacccataaacaaatgggcatagctatgtttcaataaaacctcattcatggatgctgaaatttgaatttcctacattttttacacatcacgaaatattattcttcttttgacttttaaaaactatttaaagtatcaaaaccatttttaactagcaggctgtacagaaacagagaatggctgagtttgattcttgggctgtagttggctatcttctgttttggactgttcccagtacattcacaaatatttatatatctacggaaaacctataatattatattagtgcattctctttcagaaatggtgtcataagtgtagaagtcatttaaaacttgtatttttatctcagcaatttatttttgctgagaaatatttgtatatatatttgtaccttatagtgtgtatttttatttctgttcctacatattcatgtctatatagcaatggaggtattcatatgtggctttatttgattcttttcactgctatatggtattccatcatatgatatgccatatttttaatgctagatgggtatttagtctgttgcctccccccacaaccccatcctgtatcacaagcaatagcaattatatccaaacatatccacaaatgtatcttgtgcatgttttttaggacagacattagaagtagagctgtttgataatagggtatgcacattttccattttaataggtactagtaaatcagcttcccgagagacaatatcagtttacagtgctcatgggagactctactgccattcttggtttgggaggttgcatcccttcctgttttacttatggggtgggagcaagaaaacaaccttctctctgtatcatcttgccttgtagttacagctgtaaatgtgggccttcatgtccctttgggtggctgcagacatggttttaactgtttgctgtgccccttgcacatgagaatagcaatttatatcaataaccaggtctggcaacatctgccaaggttgtcacgctctgtgattaaatggccacatgtgctgagaacacgaggacaatggggttgtaattagggcttgctgtctctccatcggccacccgcaccatgcgtcccttcctataaccttgcttttgtgaactgatttgtgaatcaaattattccactgggcatgccagtgtgtgctgggttaataataatactctatatttgtgaatctctgtaattgtacagggttctggataagcgaaagtctaaacccctttttgccattttacctggtgctgttggaaaatgtgtcaggggatcatacaagataacattagaagttaactttaaaaatagtagggagtggagcatgttcttcatggcatcattattgtgaaataaggttttactttatggttatctcagcatccgttaaatgccactgaccctgtaagaaaggcaggcagagagaacacaaatagaattttgttaactctgcaaggagaaagttaaacactgtgttaatatcatattaaaaacactcttaatgcacagaagaaaaaaaaatccctcctcgttttgttcctggtatgacaaagatggatgatggttacataaggaattggcatgttaaaaaaagacacacttgaaatattgcctctagatatgaagttgtaacgaatgtgaaaatatttgaaagatttattagcattttaatatttgcttaccaatgcataaaatcctaatcagttgtatacaagttgtatactttaactcaaataaagtatccaagaaggacacaggcaggaagccaatgaatatttcactcattgttgatcaaatataggagggatatatgtatattaaattttatttcccatttagatccttcctgtttaaataagtgcttgaggtagcaaagccatcttagtgcacacagcttgcagttctaactgtgaagagaaaggaaaaagaacaaattagtttttctacatccaagagtcatttccccagccaattaattttttggtccctaccaaaatcagcacttaagctgaagatagctagaacctgtgtaactcattcctattaacaacagcaacaaaaaaagtgaaatagatctatgaggacttcttgggaaaataacaggaaaattactttgatgatattattattcaaggtacacatatttaaaaggtgatctctaaatttcaacagagacgacagttgtttttctcctaaaagcaggctgaaacctcagcgcattctcatttagtacgtaacgtggaaaaagagttgagatcctaaagcttcgctcctaaataaagtgcagctgcttctcggagatgaaataggatgaaagcctagctgtttggggcgggaggcgagattgggggcgcggtgctggggtcttcgatgttttaccagtatttctaggtgaagcagcatattggaagtcataaatactgtcccgtggacattctgaataatgcaggagtagcgtaagtaattgggagtgcttatatccgcctttagacatttgattgctcgtgagttaaaattggttgtcaagtgcggactcagggaaccgtgcaaggtgccctattctgtcatgtggtacatatttaatgcctgaaagaacaagggaagggacacgtgcgggcgagagagggcgagcggcgagataccgcagccagctcggagctttgcaagtgcctccgacccgtaggggcgggacccacgcagccccagtatccactgccttcccccagctgcaagagtttgcaaaaacattgggcgtctcatttggcgagcgttttggcgcggacagaggccgaggccggccggggaagccggacccgggccctggcgccgccgtggcctccctttgtgcgcgcccgggtgttgattgcctccttgcacgggctgctcgctctcgcgcccgcgcgctcggggcgttctgcacctgctggcggtcgtgccaggcagcccgggcgagcgaaggcgcgcggcgcgcacgacagatgactggagtcatttacattgctagcacgtgggtgccgtttgctgttgcctcggacttctcccgtgctgtgttttcccggtgaggaaacaggaggcactttgcagccgacaatgaaatcttggcagctaattgcagtcgtgggagatgcccttcaggtacggcgagcgaagaagactctaaaacactgtcagggaaggagagaaagagggagagagggagggagggaagggagagaccaggcagcttctgcagaggcttcctgaagcccactgactccgcgggagggggttgcagagggacgggggcgggcgacagggggaggagtgtgcaaattgacatttttggctgcctgtggcagaggagcagccgtcagccgctgtccaacgttagcgcagacacggtggcggcgtgtgcgcctccggggctgctgattagaataggggacttggccgtggatggaatccgggaaacccaaaccggagatggaaggatgaggctgcgtttgcagcgcgtgaatgggacgcggtatgtaagccgagctccagctccggggacctcggagactgtgctcagggctcgccctgggtgccccgtggtgggggtggtctggacacttggagagggctagggggcgtttagagggattggggagcccggagatgcatcgattttctttacccactggaagttagtgggcaacttccttgccaatgctcattggctccgtttaactttattcccagagatgaataagcgtttattaagaaccgatgtaaaagtcccaataggctagccatggttttgcaagagatgcgcggctctggaaatgagaggtttatgaaatgaatggccagatgggttgtgcatttgcgaagttggcatgctcacgttgcaagggagcatgtgtgtgcaaatgtgagcatatgcgctgcatatctgtgtaaacatgtccaccatgctcgttgcgctggtgtactcttcatcttctctgcctgtttcccatggaagagagattaaattgacaatactgaacacgcttcgacttgagaaataagctctgtaccattttatgacatggaataagagttgccttcttctgagatcaaatgggagaaatgtgccttgccttctcaagtgatggaatgaactgttatgcatttatagaatatattatatacagagtgtcgaatgtgacatccatcagtctacaatgatcacctagcctctcaagcacagctcatccctctagcccttattttcagattatggggaaattgggggttttattatttcttttgacaaaagagctgcgttttccaccttcctacttaagagggctccaagcagaattgtgaatccaaaagttttgttggcagtgtcaccttagtaaaacgttatgaaattatttgctaaaagagtcactttctgagtgtcttcacgtagaagaatttactcattgttgacatggtttcaattttggttacacagaaatgaatgcggtttattgctgaagcaggcaaaaatgattgtgtaatcctctctttagtagggtagctgggtagtaaattgtttggcttaaaatggggacatctttctccactgtgttccctattttttgatttaaatgtgtgctggaaaatccaaagagtgtgagtaaaagggtgtttgtggcatggagtaacttgcctttgtggtttgctatgactaagtttgaagagggttgtttgttaagtaagtgaatgcaagtcaatcagcaacagctgcttgccactcaggctcacaggaatccaggcttttcatttaaaaagcaagattttccaagtcttatctgcccacacgcttcccacacgtgtgatgcctcccctctattagaatactcagaggttatgaagagggaattgttaatctgaggaatgaggtagggggacatgtagaaggagctcctccctccctctcttacccctcttctcttctctctcttggtctccctctgggtatttcttcctccttatcccattttttttcatctacgtgtatttctttccatctttctgtctttactgttttacctggtgcacagaaaccttttaggtatctttgctacactttaacatatgttttgcacgctggaggatcaccagagcctgtttttctttctttctttcaggaattctccgctcacctgcaagaattatttagtatcaggcaattccactgtacagcagtcttataaaaagtgaatattcaaacttttttatcatttctttttaaccaagcaactagactctttgaaaacacttttactatgtaaaaagagcagaatcttttctgttaccccaaattgagggtttatacgaaagtactttctgtctcatgactttattggactaagcttatttttacatttgtctcttaaaatcttatccttcaaacttctgtttttcctatcacttgtcttaattttagagtctggattcattttaatctgtatttactcagacttggtagaaataactatcagtgctgacttatgggccaggtaattgaagtacaacaaaaatagtttttcttttttgtatgatattgtgttcctttttgctcttaaaaaggaccagctaattatttttctttttttttttcctctctctactaggagtatgatacaaaagttgaaggagatctcagtaaaaggctttttttttttttttttttttttttggcattgattgccttcctataaactatagttgcaatatttggaaaatatattgtcatattttatgacactaattggtgtatatgacttttgttttgagaatccaggtacacactcctcattgttgtctttgatttgattatagacaacctgcttgaatgggccaatcttgagctaaacaaatattacaacatctagtgaagaacaaacttggtcttgttttctgtctaaatttataatttttatattagattttgagcacagttgtaatctggtgaaatgaaaagtcatctaaaagaggaagaagatatctgaactaataataaaatgattattattaattaaacttagttgtgtttagcttttagcttttattttaaaaacttcacgtgtcttagtctcaaagttatcaaagggagttggcgtaagttcttggaaagtaattctgttgggattaaaagtcctctctatgagacttcactctccatcttgtgttgattttctgacgaacataaaaagaaatgaggaaaaagcttgaacccttaattttattatttttttttttggcattttagactttactttgttatggatccaaaaactttggagtgtgttaaaatatcaaatctttgtttgcatttatgggtatgcgtttttgctctttttgttttctttcattttcatgcagggttgtgtgtttgtgtgtattatgagcagtagtcaacaggagcaaatgagaagaattttacaattatgaattctcatgcataatttgattttaattaaatcatagataatcagaatagcagtctcaaggatttaggatccctgctgaaccccctcttcttgcacggcaccaagagaaagataaaacgcctttaaaagtcagcatttaatatacagtgtttggtttggaaaccatcgcatattaaattattcagcaactataatgtcccaaacagttttcagggtgtgtttttattaagctaaataaagtttctatgaaaagttgtggggtttcagtaagttgtggggtttctgtgtgtgtgtgtgtgtgtgtgtgtgtgtgtgtgtgtacccaaaaggccgaaacagcttatgtcagctacagcaactcgtttttgattcagcaaaactaggttatgaattcaagcaattaaaaatgacagaaagcccaatttcactgcctagattaatatgcttccaatttttcctgctccataaaaatttcaaagtgttctttctgttgaggtgcttgcataacctatagggtattgggagggtctccatttcttgtttgcttatgatgtctgaatactttgatgtagcaaatgtaaataggatcagttggatatttgtaacataattttgtgcttgcaagttctcctgaaattattttggttgggtttaaaagaaaagagctgtggttagtttctaagcatttaccgatagtgaagaatctgtcggcaagctccaatgtcatgaaggccaggaaagacttttcaagaaaagatacaattatagtagaactagtgttttcagcttccaaagatggcagtgatatatgtaaaaaaaaaaaaaaaaaaaaaaaaaaaatatatatatatatatatatatatatatatatatatatatatatatatatatataaaatattatgcagtgatgggcatgtttattactttttctctattcctaaagtaatgtctggaattctagattcatgtttatctaatgagccaaatctctccctgttatttaaaatggtcctttttccttacacactaattagtagtcaaaaccagccgctttaatgatctgtagtttttggtttgttcgttaagttttctaacctggtttgaattaacttgttcacacaaagagtgtacacagacacagatatacactcaaaaagctcatctcccagcaccatttactccacgctttcaatccaatacagaaagcaacaaccaaacaaatcaaggtgcactatttgcccaatgtttgttttacagagaagacccctaaagggctgtatatgaggaaggcctctgccagcccttcctttgctcttcatggtaattctgcatctgcatttgccacagtactgtggatgtatttctttgttgtttagttgtagtctctagttgtgaggaaatcagttgttgtctgcaaagaagatgtaagtactagttggatttattgtggttagctgaatgtgtaagtacaggtcttccatttgtattaaaatgatgaggatgaggatgtgataacctgtcaacagaaacagcagtaacaatacaatgccgatttcttcccgggcacttactgactccctctgtgcatcagacattggacgaggagctcctgtgtattttctctgttcttacaactctgcaaggtaggtattaccatgcctaatttagagatggagaaacaattttcaagactttttataattagaaaaagtgattagactgcaaatttttctgattccaatatgctaagataccattgaagtttattaatctgagtttagaatttagcatttagaatctgtttacacataatgggtacttaagagatacactacgttagggtttctcaaacaggatcaatttcctcccctaacccataataatatttaacaacattttgaagacagtttttgtgtctttgcgagaggatgactccctcctgcaaaacaaaaacaaattacctggccccaaaccaacagtgccacagctgagtaattataccctaggtaatatcagtgatagtctaatataaacatggtctgatttttcaagagagggtagaaggtatgtgtacttcaattattaaacatttaaaatctctggttggatactgtgactaggatcatgatgcaaaatcagacggtccttattcccttacagtctgacactaaaattgttacagctgcttccttggaacatctttctttataaatatggcatgggtcgttgtgatttaaagtgccctatttttttccaatttacttactctttagtacgagaagtgctggaaaatgaaatttctttccttggtactcttgtcactagaagagaaatgtaacgtcactaaatgaataatggaagagcaattctaacaaccttcccatatggtccttcttttccctcagtattcaaatggcattattttcctcttatctttaaaggtttggcacataggtttattggtttatttgtttatataatattttatatttgccgagcactcttgcaaatgctttaaaatattaattcattgaatctttaagataagcctaggagattgttattgtttttatctactttttacaaagagggaacagacatccagagaagttgagtaatctgtatgagatcacacagcttctaagtggcagagctggggtttaaactccaaagtctgtgttcctagccattttctcatgtactttagtaatttgagcttctaaatgtacagaagcctaagcgttgaggcaccatcttcacccgagttttgaaacaaaagacgtttttagtctcattttggagtgcttgatgaggaaaacggacttacctgtttttgaaagagcatgagtgataatgctcacagctttatatgttgctatttaaatactcctgcagatgcacttcacctgggtcaggaggtcttgtgaattctctctaccatgaccacctccaacaacagcaaaaaagccaccaaagggaaacactaatgtacaggagggcacaatttgcaggatgagtgatctccattttatcccctacttaattgtcatgttggaaaaatagagagaaattctgcaactggatctcctaaggtgtcttcaagaaacttaagtctttgctttctgatgctcttaaaatgttctagagagccccatgtggtccatgccaggtgggtgatggtggatgtgagtacgttgactcccagcttgatctcagctaatgccaggctgtttgttgttccacatttaggccacgggaatgaccatgcctatctcagtctcagttgggtttttagtgaatagcaaatgctatgaaaagaaaaacaatttaagtatatttttaaatagaaatgccaatttgacacattttattctgctttagaagggaaaaaaagatcttgcaagtacgcaattaaatacataccagaatatccagaaaaccaagacagaagtagagagcgtcaatgaacttcagttgaataaatgagtacatggatggaacattttgtatttttcaaaatttcttgtcaagaatatgtatgggtttgtacttgaaaatgtctcacatctcgaatacaagccaccgtggtgggaaatacaggtctgacaggcgtccatttcataccagctgtcctcagcttaccaatctaaatttgtacgttacttaagtgttaggcataggtatctgcttactatttattgccctgcagaaagctcagagatgattaagcacagcttacaagtatggactgcattttacctgaggcaggacacagatttttttatacaagaaagaaagggtcacccatgaacagctcgtatctggtcatggagcaatattaaagtctcaaaaagggctgttgagctacctcctcccagcctggagacagtttaggaactgggctggaagtggaatccattactgttctttatatttcaggcccaataaactcacgtttgaacaaagagagcgaagagtgaatcccattgcagaactgtcaaaagactgatgttggatccattactgtcaaatgtccttttttaatacagttcattaaattggcttttgtggaatacctatttcatctaagtgttggttcaggaaatggtttaaaatgaaaccagaatttgttgttcagtgggaaaataaatgagatgaacccacataaccaagactacccagtaaagttctgtagatactatctattagtatgcagtactaaaatttaaattatacgtgtatatatagttatatctatagttaagctatagatatgtaacttatgtatagactagaagctacatagtctatagtctatttatatgtacatataaactatatatagatatatagttaaactatatatatagtttaattgatgaaagaaagaatgggaagttggatttaaaatagccattttaattccatatccagaagtatatggaatacttccgcatcttaaggtgagcctccttttagaaataaagataactagtgataaaccttgtatgccattaaaaagagtgtacccaacactcagtgaatttctgcccagtcttgattgtgaaattttcttaggaatctaaacatatagaagttacatcaatgttataagtggttcaggattcacattctgctgctgacagagaaagaaacctgattttgttgtaatgtactagctaattgttcagtatatagaattgcacatcattatccttcttattgatagtgtctattgagtgcctgcaataagctagacactgtactaattcccagatgtgcattattggcctgaatatttccagcagccctatgaggcagatgtgattgttatacccagggttcatgagggaaggctgaaacttgggatggtttttcaagggttaccaacagctagtgactaaaagggctgctaatcaaatttgaagctttgaggcttcgaagtccctttccccgtttttttggcccaaagctatatcaatcattgttctaacattggtgaaaaatgaatctgatgtagatgaagagatttatgtagctataggaagttcctataactctcctattaggattaaccttcttatcatcttggcaaattatgcaagtggctggatattttgggtagatgggtggatgggtagatgaatggatagatgagtagacatatagactgagtagtaatggagaagacaaattggcaaaggacatgaatataggttttggaaaaataaacataaatagcaagtatatgaaagtgtgtgtgtgtgtgcgggcgtgtgaaagtttcccttgtatatgtgaaagttttatatattgtattggaaaataatttgttgatgaaacaggcattttatatactgttagaatgtggaatagtaccttcttctgtagaggactatttgggaattcttattttgaaaaagtaggctgggcacgatggcccacgcctgtaatccaacactttgggaggccaaggaaggaggatcatgaggtcaggagttcaagaccagcctggccaacatagtggaacctcgtctctactaaaaatacaaaaatttgccaggcttggtggcaggtgcctgttagtcccagctattcaggaggctgaggcaggagaatcgctt[135 bp omitted]cctttctgcctctggaatctgtgtgatcgctgaagtttgtgaagatgcagcttggttcactgccgcattgtgaacagtcagaaggaaactggagcggaggaaatacctaagtagggtgattggaggtcaaggacccttgtaggaatgaagtggatttgcctggatgtaaaactacatctaagatgttatgagtgaggaagagcccaaaactcagaaatctgtttgaaaaactttgttagaaagcaaacatacacatgcaattgttttacatagagggcaatactgcaaaagataatgaagggactataaacagtgattatctttgttgtagctgtgcagtatgactaagagaggggcagggaagagatgaagcttttgcttttaagattacacctttattctttgtgattttcagcaaagatgccctatttggataattaaaaaatatttaagagaaaagcctccattttgcaaacaacctgtgatcactttacccctgagctgatacaggtcagcttagataccaacataggtattctgtgttggacataggcaacctaaattgcttggaaaatatatttgagccttagaaaagataaaactgaaaatcattggattcacagttatgttttggttgaggtttggggtcagtatgctctttggaatggggtggtggggtgttggaatttcctaaaaatattaaatatgtgttaacagtaatggtttgaccacagaagaaaatcaaatttccctgttgctgtacacacttgtcattcatcgccggtactgcaaaatcatgatccttatcctcccagctgtgtgtgtttgtcagggaccgtaggctgctaaaagttgtatacagtactattattttttttattcatctgtgggtcatttcatcttcctgtgcaagccacatgaatagctgtgtatgaaaattgtattttgtgccgaatttcccactgtgaaagatgtttactatatatttatgaaaacactgcagtaacaaaaccctttatatagcctttcaatttgctgtaagggcagataaaatatttttatctcaaactgaacttcataccttgggagattcagctggcctgactcagaataataaaacacttcagagaaaggcaggtgctgttcagattgcttcagaaacctgtgcacttcactcggcagatttcacttcctttaaacacgccaactgaatatacgaaagctagaaataatcagtataaactatgcaacgttaagtacaagaaatcatctttttttattaaatagtttcttaatacatctacagtagcatcagcgtgatttttaatgagtgatattttcctgtataccagaagatacagagagaaggttggcgatcattccagtgtattgaaaactttcattcctcatctgcatttaggctttggcaatgttcttaattgaaatttttacagagataaatgtagcatatgcagttgtaagaaaatatagatagatctcttgtacactattctctaatggtaatattttaccaaactgtagtatcacatcgtatcgaggatactggcatggctgcaatccactgaccttatttgaatttccctaaggttacttgcacgtatttgtgtgtatatatattgttctgtacaacttcatcgtgtgtaggtttctgtatccaccgccacaggtaaggtactgagcagttccatcctgaggttccatttgtataaccacagctatctctcgcgaccacctgcccctgttcttaacccctgtcgatcatgaatctgccttccatttgtaaaactttgttatttcaaaaatggtatataagtgagatcacagagtgcttagagttttgggatgggcttattgactcatcattccctggagttgtacctacattgttacatcagtaattttgcatggtatatatatgtaccacagcttaaccattcacctgttgaaggatatctgggttggctttgaccatcacacataaagctgtcttgaacatttgtggacaggtttttgcgtgaccgtgagtttcacttctctggcataaatgcccaggaatgggccttggagatctttgatttatgcatattatggaacacatcaatatgttgcacccattggaagtcaatgccagttgcgtacaaactgatacaaggaaaaaagaaaattgtacccacgtcttaatgtttatttttacataaacacggcactaaatgcagagaatagccagcatttatgtagcatccaccatatgccaggctgtattctaagcctgttatgtatgctaactcatttgtcctcagagcagccttatgaagtatgtactactgttcttacttatggaggaaacaccaagcacaaaatggttaagtaacttgcccaagattatacagtcatcaccacttagaggtagtcggtctggctggagaaccccgcattttaaccactaatcaatgtccccgctttcttttgtttgtttatttatttatttattttgagatgaactttcactctttcacccatgcgggagtgaagtggtggaatctcggctcattgcaacttctgcctcccggattcaagcgattcttttgccgcagcctcctgaattgctgggattataggtgcccgccaccatgcctggctaatttttgtattcttagtagagatggggtttcaccatgttttccaggctggtctcgaactcctgacctcaggtgatccaccgccccccgcccccgccttggcctccctaagtgctaatattacaggcttgagcttccgcgcctggcagacagccatctataagatgatgtccccactttcgtagatcggttggtcataacttgtgggttggctgagacagtaatattcatttagagtaaacatctattgatatcaccctgaaaagaaataataaatgaaactgggtatatagaataatcagctagctgacttcatcagcccttagctcacagctctgccttaaagcttgctttatttggccgtttcagacagatggatgcctcttatggcttttggatctccaagacgtagatttcacaaccctcccttggttacacactgtaatatttaacagctctcaatagcagtatgttctgcttttttggtgtggcccaaatctctcctatggcaaactcaacacccctcactccttcttcccacctattgaagacgtggaattgttggttgtccattgtattcacaacataaaggtatctgtttgtaacagaatattgtttggctgctttacattaatccttgagcttttcgttcctccaaaggcattttatatttccaacaggcttataaagtatttaatatttttatatgcgtcagtgtaaagccatctgttgcagtgacaggacaaaatgtggaagacaagaacaagcgtatgtttatggaaagattccatgaaatgttaacaagaaagatatgtgctactctggggtgtcttgtagaaaacggtcaggggaatttggaaaggcatggcttacagcattggtatttgtaaattagtgtttataaaaggcatgtgcactttttttttctattgtcctgcaaatttagactagattgttgacataaatggtgacagtgaccactctgaaaggaaatggtggtgtgacctaatatttggaacttccttcatttgttgttcttcattcacaggcttcaactttttccttttcatttgaacaagtggattgggaacctgctttgcggcaggcgtttgtgttgctggaatagctagattgtgtttctaaacagctagaactgtttctcagtgccttacttttaatagccgtgttgtggtcttgctcatacagaaacaatcagacgggaatcaattttgcctgcccacttgaacgtatcagtttaggcacagttatccaaagctgttgctgcattacattgcccctcgtcgaactgggctcagaaaatcaaagcaagttgccccaagcgaagacaccaatgctcttggggaaacacatcacagctaaattacagcgagtattggccgggcacggtgtctcatgcctgtaatcccagcactgtgggaggccagggtgggtggatcgcttgaggtcaggagttcgagaccagcctggccaacatggtgaaacgtcatctctactaaaaacacaaaaattggcctggtgtgatggcgggtgcctgtaatcccagctactcgggaggctgaggcaggagagtcgcttgaacccaggaggtggagattgtggtgagccgagactacgccattgcactccagcctgggcaacaagagagaaactccgtcttcggaaaaaaagacaaaaagaaaatgcactaagtatagtatctgccaagtactacgagaggcactgtgtcttggttggcttatatgaggctctcaaacctcttaggtagcataagaagtcattgtctccattttacagatgagggagcaattttagagaaggtaattaaccaaatattacattgctaacatggagtggactgggaacttggcaacaggccgactaaacccacaagcagcttgcttaaccactgtgttttgtaactgaggctggagaaagaggaggagcttgtgaggtgccttccagaccagctcttctcaggtgggcattagctgggatgtgtgggtcaaagatgcagtatgttgttgagatgtgacattgacatggagcttgatgccctccacagactttctctaaaagttcttcatttctcagctacttttcccactctgtagatagtcacttctcaaggcccagagagcacttggagaaagaagttggtgtgaactctagaagaacagctcttcaaaatgccgcaatggagcaaggacatgtggaataacctccagtataaatcctttacaccgatttttgaagtttttaaaaaaaaaaaaaaaacagagttttgctcttgtcacccaggctggactgcagtggcgcgatcttggcttactgcaacctctgcctcccaggttcaagtgattgtcctgcctcagcctcctgagtagctgagattacaggcagataccaccatgcctggctaatttttgtatttttagtagagacagggtttcaccatattagccaggctgacctcgaactcctgacctcaagtgatccacccatctcagcctcccaaagtgtaggtattacaggcgtgagtcaccactcccggccctattttatattcacaagtgtgagaaagtgcctaaaagcattcagaggttttcaatcatatttataaataaattaatcactgttacccatgtcaaaagatgacaattccaggccaggcacagtggttcatgcctgtaatcccaacactttgggaggctgaggcgggtggatcgcctaaggtcaagagtttgagaccagccttgccagcatgatgaaaccccgtctctacttaaaatgttataaaaaatagccgggcatggtggtacgtgcctgtagtcccagctacctggaaggctgaggcacgagaatcactactacctgggaggtggaggttgcagtgagccaagattgtgccactgcgctcaagcctgggtgacagagaggaactccgtctcaaaacaaaaaaaaaaaaaaggatgacaattccagatagctattcctaggttgataaaattactgagatagtagaatttagagagacttatgagcagaaatatatattgacagaagagcaaaatatcattgtatttcgttaatagaggaacaataatcaggctatctgaaagagaagacagaccagttagcttctaaatgctgttcatttatttcagtcagccttctcagaaggatattggggcttggttcagcaatcaggcccttttagacccatagattttgcctgcaggtgttcctctccaacgattagattgtgatgataggctataaacttcatgaagacagagaacaggtgagcaatatacaattagttcctagcacaatgtctgcccatattaaggacttcgataagggtttctaaagaatgtgtgatcacattggattgtcccagagtatttacaatgtattaagtcctggaaaatctaaataataattatatctataataattggataatgtttcagagtcctattgaggaaagatagtgttattcccacctgctagttcttctcctgaagccaagatatgcatggtaaaagccatggcacagttagtatctgatccctcaactaaaatactgacaccaccttctataggcttatacggcaagtagcagtatgccttggagccttctcctccaatacaccccattggcaaaaagcgacttatggttaatgcaacagtgaaaataaattattaccattctatgattgtgtgacaggttagtaattaacttatgtcaccagttggcttcgcacaactgtgtttattcagctccgtggagcacttttcagggaaaaagaaattatcagccaggcagcctttgtttactgtggaagctggatgctggtggactgcatctcctcctattgactaggaaataagttggttgttaggacatgattttccattcttcaaaatgatatggtgatgcaaggaatttgaaagctacactggaattagaaaagcataaagaaattgccttttatgcactaatcgagccattatgcctgtttcctttggggtatttttttactgtatagacaccacaaacagccatgtgtaaaaaaaaaaggtatgaaaaatcttaattaaaataaaaactgtagtatgtgtttttatcccattgtaggttaagtgggtatcacacagcctagggacaatggtattagatttgtaataagcacaagtaaagcttttcattttgattggattgggtgtatttttcatcagcatctcccgtgtgagccatgattccaagacagagtcttgtaatcttctgcagtgggaatgattcagcttaaaaatcagtagggcatgaggtatttcaagttctcattattgtaatgtgtcaacatcacttcagtgaccccagagtcctatgttggctggttttccccctgatttattgtgcaatctcgtagggcaaactataatttcacttggaatcagaaagtctccatttatggtttgtgtcccagtctccagtcattagggcattcgcgggtaatcgatacctcctcttgttgctaacagctgaatgaagttgtcacctgcttagattacaaaggagtcgggtaaaaggatgtggtaagggtgagtacattgaacaagttctgttttgagaagggctttctctgatgtttacctgccgcctcgtgaagggctttcagcattttttgggacctcctttctagaaacccttatcactgaattagcacaatgttttatttcttcttttgtgaaccgggtgtgaatgatgtcatttcctttggttaaaaaacaagttgaaggagccattcttgaaagtctgcatgctgacacattttctagaaacctttgagtcacgccaactctttttaaatacctggtcatcatgctacaattaaaagaatggtatcttctattttttcctaattggcaaaatacctaggagcttattgaggcctttagcaagaagaccatcatctgtgttcaacacaccatgcttcaaggtatacacattctattttgctgcacatggacatggatgcacgtgtgcacatacacacacacacactcagagcttctcactagaggatattcactgaccatttatatgatattgttaagtcacacaaagcacagtgactccaaattgcagctccaacacctagtacttggccaagggtgagaaggtctacacagatcaacttttgcagaaatatgattaagtcatctcaggaatgttccataatattctgaacacaatagagtcccttccctcaagaaaattaatatccagccatggaaaagagccaaggtgaagaggcaattgaagtacatggactgtaactacagaggcttaagaatggcaagaagaggcattgaactcagggtcttagaaaacttggacactgacatcaacacttgacaacatcttgactgcatgtcaagatgttgttattctcctcacaaagattataaaccaactgtgatatgtgtgcaggagaaaaatcatcgtgttttaaagttgaccttgtccattaagatcattgtcttttatctcagcccttggggagtagtttttttttttttttttttttttttaatgctgagacatcctctgtcccttgttaagttttgggttggtgttgctggaccagccatgttcctgtcttttcttcctatccttcctggcagagccccttcctcccagagctacttcagcagggtaggatggtctcactgcccatgggagtctgcccctggaccctatcctgcttgatgagttcagaggtctttctgctgagcctctttgtcttgccagttaaacattctttttttttttttttttttttatttcacttgaagttttagggtacatgtgcacaacgtgcaggtttgttacatatgtatacatgtgccatgttggtgtgctgcacccatcaactcttcatttagcattaggtatatctccaaatgctatccctcccccctccccccaccccacaacagtccccggtgtgtgatgttccccttcctgtgtccatgtgttctcactgttcaattcccacctatgagtgagaacatgtggtgtttgtttttttgtccttgcgatagtttgctaagaatgatggtttccagcttcgtccatgtccctacaaaggacatgaactcaccatttttatggctgcatagtactccatggtgtatatgtgccacattttcttaatccagtctatcattgttggacatttgggttggttccaagtctttgctattgtgaatagtgccacaataaacatacgtgtgcatgcatgtgtctttatagcagcatgatttagaatccaaacattcttatagacaagggctccttctcctgacgtttctgatctcattctaaaacattcacccagtccactgacctgtactgggcgctgtgctgggtgccaggcactgcttttccatattcttttctaaactgctaaaatgggtgattattcctccaggctctttgctgacactggggggaaattcttcttggttttcacacccctcttaggacgtgtcttccactctggctttacttgttcatagattcatgaaatcctcaacagagatccttgcaagtgctgaggagatagtggtgaacaaaatagataagatttctgcttttgtaaagtttacattcttctagggatcgtgtgtccttgatttggaatgcctgcttaggggggtcatgagggtataaccctggtttcctagtttccagggaatgggttgggtcattccttgtgtaacagaatattacccaactggaaccaaaaaattccttcagtgtcccttcaggcattggctttagctagtaggaggatgtagagaaattttgtgcttctgttatatctttctcatggggagctatgcagatccatctgtagggatctagatcggctacaatagtagtggccccagagaaagttgacatcagaacccctgatctacctggcatgccacctttaagggctttaacttcagctctgtgacgttccctaggaaaatcccaagaagaggtgtcccaaaccagtggtataagtaagagcttaggtcttgagtccatcactaaagaccttgggcaagttatttaatctctttaagtctcagtttgctcatctgtaaaataggatggcagtataacccatctactattttaaggattgtacgacattctgcacctaacaccttagcatagtacctaacacataggagattttagtaattattaactactatgagagaggtcaaggaggggagggagaggtgccatccatggtggataagttgtgctagcaagtgtttgtatgtggaacttttctattgttaactcttttacctctgctaatttttgccattaccaccggacccctatgtaggactcatctcctctagggtaaggtgccccgatggatcatgattatcagcatcctttttagacatggatgtaagatacttctttcttggcattctattctattctcgctggttctggattgaatccaaatactaactggggttatgtccgttttatagcaatgccatgttacaacttgtaaaccgtcatattatgtagccacttaaaggatgaagtaggccttaatctgatattatggaaagaagataatatcgactcagctgagatattaatgtatagatagataaatggggaaaaggatggtaaaaagtagtataatatgtatttataaagatttagacatatggatgcatggatatattctcaacagacctaagaaactatgaagagtgattattcaaagaaaggatgctgagacttcatggtaggagcatactaccaatttattatatgtgatttttttattatttgttttcataacatttttttaataaaaataacgttaaaataaatcttaagcacagcccccaaatatctatacttatctatgggcagtctttgtttatctcttttccacttctccagacgagatgggataaaggagattgtagaagcctggggagtcatagcactcttgttcttgtaacagttagcttttgctggtaacaaacaattccaatatttcgtggcttaaaaaaatcatatgtttgttcacatttccctgggtggaccatgtgggctgtgctcagcaggacatttcttctgatggtttcatctgggtttactcacaccactgaaattgaattgcctagaatgtcttgacacacatacttggtgatttgctgggttgcctcagttttcttatttgtggccttttcggcaggcttgcttaggcttggtcagcaagctaacttgagtctcagggaccccagtgcagcagtgtagcaatctctaactgaggagcatctttcatcccttccatatgttgcattttctgatgtctactggaccaaatcaagacacacagccaatcccagagtgagtgatgtctcgcgatggaggaagcttcacactcacctggaaaaggtatatgcaaatggggatgggataagtttgtggccattgtttgcatctacccaggcctctttaaggcaagccatgcactgaagggaataatgctctacgaggaggatgttccttaagccggaccttcatccctaaatcatctttggcacttgaattcaagatacatgtagtctctccctttttaagagcagccttctatttgcttatacgtatgcatctttcttatcttttattgtttcagcaccactgataattttgctttttggttcttttttgttccttcagtgaaatggcagcccagaggtaaggtagtcagtagtcatatacctctagtgacaaagaacaacccctggataaagcaccatgtatcttcagggagctgtgcaagcctgcatgatagagctagcaccaacggtgttctgacaagtatgtcgattctgagcttctccacagtccacctgttgggaatctatttgctttggattaaaggcaccagtgcatccagcttcaacttcacattcccctgcccttcaccatcagacagtttatttcagagatcatttgggatctaatgtgtttgcttttctgattctgctggcactggtgtatgcttcaccattggtttatggatgcacagagtaccggggtagtatagagtgagaaaatttgcatgagacctttgtaatgtgaaacttaattaaaagtgcagaggactcaaagtaacagggagctagaatgagggatgagtttgcctatctacattccaaacatactgagtcttatttgacacctcatgttggtagatagatgggcaagtgtgaggggtagtaggtatgacctgtcccactgccatgttttccaaaagctccttgtacatgcattgaattgcatacttgcaagctttatcttacaaaagcagaataaagtgcatcaaatcggcacttctatttaaaaaacaaagtctggccaggtgcagtggctcacgcctgtaatcccagcactttgggaggccgaggtgggtgaatcacgaggtcaggagttcaagactagcctgcccaacatggtgaaactctgtctctactaaaattacaaaaaaaaaaaaattttgtaattttttaactgggctagtggcaggtgcctgtaatcccagctacttgggaggctgaggcaagagaatcgcttgaacccaggaggcagaggttgcagtgagccaagattgtgctgctctactccatcttgggcaacagagtgacactccgtctcaataaataaataaataaaaattagaaaaataaagtctactcaaattattttttttccttcaccagacttgggggtttctgccctagttatgcagtttcttgctcagtggttggatttgaagtattccttaaagctcttgattgtcagtcacttttatgtagttgtcactttcagtatgtcacagtcaatagcagaaatgtgaagcttgtagacattcattttcaccctgatattcatcactcaattgagctttgtttatataaggaatctaaaaatgcacacatttatgattagtaaaaatggcatttgggaaaaacttttcaacaggagaatatttggaaacaaaatgctcccattacatccaggaggaatgtgaattttggaaatcccaaataaaatcagaattgaaaaatattaggtattctcgaatgcagtttttagacacacgtttactctgtgtattctcaccgtctagtacagctagacagagattatggggtcctggcttatgtttgggtatagcagagatgaggtgaaataaataaggtattgatttaatcctcaagaactctactcatttaaatggacagagaaaacagatgtacatgatacattcaaaggaaaaagtgtagtactctttggtacagactaaaaactcaagagtctaatgaaggagaaatcacatacgtaagagtggtacataagagaattccttggaggcagtggttctgataacacattcattcatttcaaatgtatccaggtcctactcagtgttggggtaaggagctggtgccactgttaaacaatgggcgaaagtgacagagaacctgttacctaggagcatacagttgagtggggtcaggagaggaggttagtgacatgggtggaagaggaaatcacatcatcacaatagcaaacctctaattactatctgagctaactgggataggtgacctaaaggaaagattcctgattctagcaaagcagttagcaaaggtgcacccttgcatatatccagacatgccctactaagaaagtggcactgagctgagagtgggaaaaatgagaaacagttaatttagaagcgaagagtcttctggacaacaggagtgggcaggtcatgtagatgccccaagtgggaggcagaagtcagtgcttctggactaagggaggaccatgtgggatgggggagagaatagagtggggaaatgtagtgacagcagccagcagggagtatggggagctggagggaagagccagacactcagatctatggggaaggcattgcagtattgaaaacagcttgggtgaaggcagaaccagggtggaaaaggcttagttggagaaacaaaaggagagggtttcgtggtcaaaggcagtgagaaagaaggctgagggaatgaaccaagactctattaaaaaagatgcgtcagggttaagtggggaccatttataaacttgggacatctatggacccacagtgtagtctagactcacctttgatgttgaatttgtcagtataaacggtaataacaatcacagtagctaatttttttttttttttttttttttttttttttttttttttttgagatggagtctcgctttgtctcccaggctggagtacagtggcttcatcttggcttaccgcaacttctgcctccaggttcaggtgattctcaggccttaccctcccaagaagctgggattacaggcaccaaccaccatgcctggctattttctgtaatttttagtagagagagggtttggccatgttggccaggctggtctcaaactcctgacctcaagtgatccacctgccttggcctcccaaagtgctggggttacagtcatgagccaccgtgcccagccttagtagtagctaatctttagtgtgggatttctttatgtcaggcagtgaacttactgtggtagagggctcatgactgcttccttttcaaccctacgctgtccatctgtgaacatttccttcaaatcctacctccaaggtacatcccaagtctccgcttctgatgttttcactgcctcagccttctgagccagcatcgttcctcacctccactgcagagatggcttcctagccagacatcccaagacctagttttaccttcctccaatccattatacacatgatagacaaaattacttaaaacataaatcaactatacacccattttcatagcagcatgtttacaataaaaaagaggtggaagcaactcaaattaaatgggtatacagaatgtggtttgtctataccatggaatattattcaaccttaaaagggaaagaaagggctgggcatggaggctaatgcctgtaatcccaacactttgtgaggctaaggcaggaggattaatagaacctaggagttggaaatcaacctgggcaacataacaagaccctatctgtacaaaaaaaaaaaaaaaaaagcctggcatagtggcacacacttgtagttccagctacccccaggctgaggtgggaggatcacttgagcccaggaggtggaggctgcagtgagctgtgattgcaccactgcactccagcctggacagaaatcctgttatatgtccaacatggatgaaccttaatggcattatgctaagagagataagatagtcacaaaaagacacatacagtatgattccacttatataaagtatctaaagtagtcaaattcataaagacagaaagtagagtggtggttagccagggctagaaggaggggggaatggggaatgggggttttgttttaatgggtagagatttcagatttgcaagataaagagttctacagatgtattgtacaaaatacacttacgttcattgcatcacttttcacaatagcaaagacatggaatcaacctaaatgcccatcaatgatagactggataaagaaaatgtggtacatatacatgatggaatactatgcagccataaaaaagaaaaagatcatgtcctttgcagggacatgaatggagctggaggtcattatccttagcaaactaatgcaggagcagaaaaccaaatactgcatgttctcacttataagtgagagctaaatgatgagaacgcatggacacatagagtgaaacaacacatcctggggccttttggagggtggaaggtggaaggagggagaggatcaggaaaaataactaatgggtactagccttattacctgggtgatggaataatctgtacaacaaaaccctatgacacaagttacctatgtaacaaacctgcacttgtccccgaacataaaacttaaaacaaaaatataatgtaagtagacttaacactcctgaactgtacacttaagaattgttaagattatgtgggttttttaaccacagtaaaaaaaaattcaaaaaaccaaaaagaaaacataattcagctaatcccttaaaaccttccaaaggtgtcctactgtgcttagaaagagagaaaaaatgactgttgtctataaggtcccgtaacatctcgtctctgcttccctcaaagacgtttcctattgctgtttcttctttacttttctcttgaacttctctctctcctgcttaccgtaaaacatggcaaggtcattccatcctttgcatctgcagttacttcatcctaaaattctctacgcctaaattcacaggatgaattacttgccatatttaaggctctgtattaaatttagagaagaaatttgccatttatattaggttgatacaaaagtaatcacggtaaaactgcgcttacttttgcaccaacctacgaatcataacaaaaaaaaaaaaataaagattcttaacactgttgttatcattaatggtattcattatctgtgcctcaggttgagacctggtttctcagtactatgtgaatgtaaagtttttattttgtaggatttaattttaatggcagttaagatcacccttcttcatggcaccatacatttggatgagattttaaaatataccactgatcttgagaaaagactgattttatttcaaaggagtaaccagattttgttgtgctttcttttgtcttaagtaacccttaacctttaatgcagagaggatcttccagtaaaatcccattatctggtaaaggtatttttggggggagctggccaacagatttaaaatggaggaatttttttcctatgcggttatttgagctccttatatattctggttattaatcccttgtcagataaattggtaacgaaaatatggtacatatacacagtggactactattcagctataaaaagaatgagatcctgtcatttgcaacaacatagatggaactggaggtcatgatgctgagtgcaataagccaggcacagaaagaggaactttgcatgttcttgcttatttgtgggagctaacacttaaaataattgaactcatggagacagaaagtagaaggatggttaccagaggccaggaaggatagtgtggaaggaagaaatggggctggttcatgggaacaaaacatagttaaaaagaacgaataagtcttagtgtttgctagcaaaacagggtgactgtagtcaaaaaaaatttaagtgtacatttttaaataagtaaaagagtataatcggattgtttgcagcacaaaagattaaatgcttaaggagatggagacccatttaccctgatgtgattattaagcattgcagatctgtaccaaaatatctcatgtaactcataaatatatacacttaccatgttctcccaaacatgaaaaatataaaattttcaaaatagaaaaaactgtaggagaagtcagatttgaggagatgtaaaataaactatatccctgataatgcaggagacgctccataagtgatgggatgtttactcaaaggcaaatgtgaagttggccaaccttagacaattggccacatgcgattcagggcaggggtggtgtctgttcctgtgattgaagcagcttcatatcaggctcctgtcttcctagggatgcttatagttactgaaagcttctgactgtaacttcctctatcctgagctctttgatgggagtcagtagagaaagagaagagtggaaacatatgtatgctctcttcctcattataaagatttatttttattagcccctttgtctcatgtggctggcattgaacagccacaccggaaccattattggattctgcaagcatctctgaaagccggcttttcagtcacctcaagttgaagtgtttttgagatttgaactgcttttgttcgtggaaggtcacatgtgatgccacagaagccaactcccagtttcccgatgccgttctgctcttgttgttgatgacacgctgagtccctgacctggctaagctccctcactaagaaagatgtgattttggtcacagaggagaccaggtgagggacagcaggcacagatgacaacacattattatcattcatttgttcactgactacccaagcaattggagtctgttggattccatgtgatggagaagtcgggaggatgaaagcctgcgtatgcctccagaggctccctaccaaatgatttttaatagtctgtatccctcccacaaacacagttggttactctactgggcaatgaagtttaaaggttggagaggctccaaatctgggcacagagaaatctcagcttaattgtcccaaactattaaaaaaaagacaacaatttgttgccagtacctggcggactgctaaaggtttttgtcatttgttaagtagtgttgcacccttagtgctgcacccttaaaaaaaaaaaaaggaaaaaaaggtatgccctctttaatacttactagtggctgactcataattttaagcatgaaagacaaggagtggatttgaaatgtggtgtgtgctgcttctgtctcccacggcagcatccaatgctgtcacgagctgttaaatgatgagttctgaggggtgtatgtttaaaagcaacattgaggttgcaagcatccaggaccattgaggtagcgtggatcagaatggcttttccacgtaagagcaggcactggataaagcccagtgtgcctcctggtgttacgctgggttggtggaaaagcctctggaaaatcccaaaagagaaagatggaggagcgaagagtgtgatactctgatactcagatgtgttggtgcccccataaaaggggttcacaggaaatagggaggaataggccagtgtgctggttcactttggcttgacacatgcaaattgcctaaaatctcttctatgctttttcttagtgtctatcatgtagcagaaatgaatccctcttggtagattgagaatatcatacgcaaaatgaagacctgggaattttcctgctctgttcctaggccctggactgacatgggagaattttaaaacatgcgcttttagaatcaaaattagttttcatgtctgcagagacaaggagcccatggaaactaccaactggcattgctgagaataattattgtcaaattgagtccattgtgaatagtcctcatacataattgccctggttagaatgagcgccaaagagggagctttaatatttactaactccctggtgaagaaagaaaccttttgctttattaaaggctgtggtgatagtaatttgctgatggaatgcattagtgacatgcactatagatggattttataagaagacattgtccagaagagattattcaaattctactagtggctttcctctttgtagaagtatctagacttgaagtcacggctttcttcttttgataatatcttgattcagtaggaaaccagtgcctgtgcagctctttgtaggagtgtctatttcataaagttcagattatgtcagtatttcataacagccaggtctttccctgagacttacccctacagggataagagaacaagcaggacatggtggcttatacctgtaatccaagccctctgagaggccaaggcaggaggatcccttgagcccaggagttcaagaccagtgtatgcaacatagtaagacctctcttctctacaaataaaatgaaaaaaaaaaaggaattcgccaggcatgatggtgcatgcctgtggtcccacttacttgggttgctgaggtcgtaggattgcttgagcccaggaggttgaggctgcagtgaaccatgatcacaccactgcattccagcctgggtaacagagcaagaccctgtatcaaaaaaaaaaaaaaaaggtaagagaaaaagagatttatgcatgtatttaatgaaaaacatacattatcattagattaataaaacttcaatcaagagtgctcaaaattcaagcctcgggtaggatagggaatgcgttgcattcaggccttggacatgtttttcttggataggtcatggagttgaggggtaagcatgggacaagtccagcatcagaccaaagaagcctaatgtagagggtctggaccaagactgggtgttgctagacattacacaagagcctctttttagtcttctgcctccaatggacacccatgactgatcctaggaaatgttacacatttccagagttctcccaagaaaatgggaatatctgtgaggctttctagttcagtccccacatgctatgaggacccttgctgtcttgtgttttggagaccgtgacgtcactgtcttgtttctgtggccacaggagagtcagtcagcaggagcaagaggatggagtagtctcattgtcttagccacagccaagcctaagctttgctctaggtcaaatgatccaatgctggcccatgaaggggagtcaactgactttattttgaaggtttttaactagagagaatgtcaactctgcattggccttctatcttttgctgttacacatgaagttttgtattgggatggaaaggagaagcagaataattttgttacgaattcctacttctcatcgatgtctccttcccactgtgaaaatacaaaatagcacatcaatcaatatggcacagtattgaagaatccaagtcagccagttctagtctggcttcaaatcccagctctaccacccattcttaagtgaaatcttaggtagctctctgagcttcagcgacttcatctgtaaactcatgagagtaagaatgcctagcatattggggcttaggtaagagtaaatgagttagtgaatgctgggcacttagcacagtggttgccacgtagcaaatgcctggcaaagggactgggctgctggtagtgattctgtcagcttctcctccttgttgtctaactttgtgcttggatagcattccttatggcctcatatctacacatcaaacttttcaggggaagagagagcacattggactcatgactctgtgtaaaagtttggagaccatgaggccgggcgcggtggctcacgtctgtaatctcatcactttgggaggtcgaggcaggcggatcacctgaggtcaggagttcgagaccagcctagccaacatggtgaaaacctgtctctactaaaaatacaaaaattagctgggcagggtggcacacgcctgtaatgacagctattcgggaggccgaggcagaagaatcacttgaacttgggaggcggaggttgtagtgagccgaaatcgcaccattgcactccagcctgggggacaagagtgagacttcgtctcaaaaacaaacaaacaaacaaaaaaaaacaaagtctggaaaccatgacatcattgtcttgtttctgtggccactgcagagccaatcagttcaagcgagagggtggagtgttctcattggtttggactaggacgcataatccaatactgtcacctgagggggcgtcaggctgaaagagatccccaagtggaaaacgggctgatgggaagaacagaaatagggaaaataaagatggaggaggctcaacacatgtccactgtgctttgcaaatggcgcatgtccaccttacagagaatcaacacctcaaggcatgaactgtgttgctctgtaagtccgtagccattggtcgtcaagaatgagcttccctgtcattaggtgaacccagaagtaatcagccctaggtgtcacgttccatccagtgctctttctgcttttgagccacttactgaaaggcttatctcccatcctttggggatgctctctgcttaaaaggatgtttagaatgccatttgtagcacacacacgtacacgggcaatcctttccacttcatcttaccatattcatctgaatctggcttcccgagagtctctgtagtatggcgtggaggcttaagagcttctgtgtctttcagagggtagaaggagattcagtcgactttcttttgcccacatgaattgatgctatgctcctttaagtgccaggtttagtcccctgctgagatcacacttacctcaactaaattatttttcatttaaaagcagccatccattcacagtcttttatttgtgtttcaatgatgtttgtaaatgtgctctagcagttgaaagtgtaggcacgtatgtgggggagcattcctgatgttcccctcaccacgcatttgtgtacccctcacatgccctttgtctgtgtctcatccatctctaacatgaccacaaaaatggtgtctcctgaagtgttcaaggatctaccctcctccatagtcatgaagtttctagtaataatggtaattattcttattgtaataaggaggaaggggtggaggagaaaaaagtgatggagaaaaatggtgtctcctgaagtgttcatggatccgccctcccttgtagtcatggagtttccaataataatgataattattttaataaggaggaaggggaggaggagaaaaaagagggagagaaaaggggagaatgaggacatgaaggaggaagagaaggagttggagaatgaaaagaaaaacaagaacaaaaacaaccagagaaataacagtgtagtattagcacatctttgacacaagcttcaataatttctgaagaagtgaaggaaggaagaaaagaatggaaggaaggaaaggagagaaggagagaagaaatgggtgtatattacaggtttacttatgtgctaagtcctgtggtcagaccttgacatttcattttctcctgtaatgttcactctggctatacaagatcagtgatttcattatttgcactttctagataaggatgctgagcaaagtggcttacttttctgtattcttcctctcctgacccatccattttatgctcagctgctaggcttgtctttgtcagacacattgcttatgccagtcttctactcaaacaaccttcagaagttcccagttgagcattacgtaaaaccaaacatatgagcctgagatttagagtcctcccattttggtcctggacatatttttcttagaatctaagacataactaatatgctgtctacccactttgggtcatacccaaatggccagttacattgttcccatgtcttcccttgagagcagacatttatgaacctctgtttaaatagaataatttttttctaaagaagcctttttatggatcaaaatccttccattattctctgtgcttacagagtcttaagtctaaataatctctttaatctgcctgccttctcttattccatttctcaaaaccctcccctgctttgacttcaggctaccccatacctccactgtgctgaactaatgttagccataaacatacttgcacctgctgtttcctttacctggaacagctccttcatccgcctgaagtctctcacccaccctaatggcctcttgggtgaatttcactctatcctttaacacctagctcaaatgtcagctttgcataattttccttgactctcctagatggaatgagtctgtgaaacctgtatttttttaggtactggtactgaaatacctgaaccctgtatttagacttcctggttttattttttattttattttattttttgagacagagtcttgctctgtatcccagagcaatggtacactccaatcccggagctggagtgcaatgatagaatcttggctcactgtaacttccgccgcccaggttcaagcagttcttctgcttcagcctcccgagtagctgggattacaggcatgtgccaccatgcctggctaatacttgtatttttagtagtgacaggattttgccatgttggccaggctagtctcgaactcctgacctcaggtgagacttcttgtctttaaattttagctctgccttctatgaaatgtgtgagtttagataagctgctatctaatcctcagtttcttcatctgtaaaatggacataggcttcaaacccatatcacatagttgtaagaaataataaaaggtgatcatggaacacttagcagtattcaacagtagcactcaacagcccctgttgttaagattattttatgttcatatgtttaaaatgtctttgtttcagaggaaaaactcctcaaacataaggcttgttaattttttataaccctagcactttgtacatgaagagtgactagttcataaaacccaacactttcatggaattgaaaaatacttttttattgaataaggcattggaagacaatctgttgattgtcaagatttcagtaacatcaccaattattcgtggtgctagttgcaagtaaaatgaaaaaatgttgttttctccattctcattgtggtttggggtaacttcgattaaaatgcatatataaaccagtaatttcaccaatagttggtagagacattgcaacacaaaacctgcccaggtgtggaggatgggcatacagtggggtattatgggaatgttgcatttgaaaaagagccccagtcttggcaccttgacatcttcctgggaaaactaaccgctttcctccacaaatatgctctgggggcagagataaagtatgaggctaggtcagaagctgtgagcataaattcctactagtgtagacatcaacataatgaatgttccttttagcctctcattccaaatatagaggtggaaggcatgtccaaggttgtgacacaggatgactggcttgttgtgggccacttgtgaccaagacatttcccagtacatgctggttcctaatttaggtccttggctcgcttctgacaagccactttatggaagggcgtgatgatatatggccttcccctgctgaacagctcgcattttgacatcacccacaattctgcatattcagtttgctctaatccagacataactgttctcccttcacctttagtattcaaggttgcatcctgatccgaatacatctgtgtttggggcaaaactggagggtcgtcaattaatcttaggcatgacagtttattactccctgaagtctctctttctccttctctgctggacagagaaacagagaattcccatttctgataccagtgtctcctgtctcccagctggcttctctttggcagcacttctccacctacactgccgaagtgggagaggatgtgaggatttatattcaaggagaatttagaaatgctttgtgtttcagagagtgctttgcctgggtgtttaatcccgtgaccatcaaacccctcgagatagtacttgatggctacaataaactggcctctttcctattgtctcttcttgattacaaaccctgtcttgcacgatggtttcaaaattatcctcctgcactttctgccacatcccttcatggccaagatttttccaagttgtaaaatatttttgcttttcttccattcgttattttattttccaattcttaaaagtacataaccagagattgtatgagaaataaatgtcttataaagtctggggccttaatacttgtggtgatgataatgagatgtcgatagtagtgatgatggtgatggtaattgtgatgatggctattttgcattttggagacatgagacccactgagttaaatgatgttcttgatgcctcattgactctgaagttcttgtctgtctttgttgaactaattcaagttggagattttccttttgtttcttttcacccctaaatgtcaccattcctgcaatggatgaaaatgtggatttgttttttaggaagtctaagtggatgagattaatagcctgccctgtggtttgttaaataaacttgataaggttttattgattaccttgagggttgtctgggccaaacaccatgtaccatttaagaaacaaacattagttaagaaaagttttcatctcacttgaggaggggaaaaaattattgcaagatacgtgatccagggaaaggacaaactgagagattcatggctcaaggctttctgtgggtgtcaagttgggggtcatggggaaagaaaaagtgcaccaatcaggggccaggtgatgaccgtgtgtcatttcaattaatgtgcttctattatacagatgggcacactgagagtcagttattttgtgtagttttctctgggtcatgtagatctgattccagttcaaaatcatgctctggcacctcctgtgctgggaaaacatcctgggaaggtgaaattcagaccacttactgcctccagctcttggggcttcttgacattgtcctagtgtttgccttaagggccacccggagtaactgccctttgaattttatctatgtatgtatctgtccatccgtccgtccgtccatccatccatccatctatctctgtctgtctgtctatccatctatctatccatctgtctgtctgtctgtgtgtctgtctatctatctatctatctatctatctatctatctatctatctatctatctgtcttcctgcagaagtagcaaacgtgccccgttcttccctggagctagcaaaagcagggatagcatttggtcagagttcagccacacacttcttttctttctggcttaccaccacctagtggggccagaaaataaagggggaaatattttctcagtgggctcccaaggactgtgagaagataaacacttaattctaactactttctcccttctcggtgagaagctgccacccatcgtatgcacaaagtggaaaggcacaaagtggaaagcttgacttgccaagccagccaaatgtctctgcagtcaagatatggggggaaccgtctgtgtaatttatctctaaaatggaattggtaatacctgccctgcctaccacactgggttgagtgaagagtgggagtgctctgtgcaccagaaagggtcaaatgaaatgagaatagtcaggtgatactattgtgttgcattgtcattgcagttaatacttccttttggagaagaaatactgtacatggggatatagccctccaccttgggaaaacccagagaatattcatttctgatggaaactgtggctgggcgcagtggctcatggctgtaatcccagcactttgggaggccaactcaggaagatcacctgaggtcaagagttggagaccaacctggccaacatgacaaaaccccgtctgcactaaaaatacaaaaattagccaggcgtggtggtacatgcctgcaattccagctactcaggaggctgaggccagagaattgcttgaacccgggaggtggaggttgcagtgagctgagatcacgctactgcactgcagtctgggtgacaagaatggaactctgtctcaaaaagataatagaagaaaactctgcgagaactaccaattacccaccacctattgtatgcccggttctgtattagcaactcagtagacactttcttatttagtgtctaaggtcttcattatctccatttcataggactgagggttagcaagatgaaaggacttaaccagaactaaggcaactgatatataccagaactgtgggtttggccccatgctcttaaccacccttctgcaatgactgagcaggtgctttgggtcagtaggcatggtattaaactatcagtctgtcttccttcctgggagagacacaaaaacattgagaactcatgggcatgtttccaccgtgcaggtgctaaggtttcttatttcgtgaccagagaccaggcacattcagtgaactgcttcattcggaggtgcttggagcttcttcatggccatcctttgcaacttggagtatgcaaacaacatttcttctctaaattaaaagcttccaaagttatgatggtatgtgctttttaaagaaaggatgtattcaaaatttaaagcgatgttgaattttgatagtattgctttgtaggttgttaaattgtggctttagacaatgagttgtttatagaactacaaaatccttgtgaggaattcagatttgtctacctttcttagagggtcctaatgaggttgtgttttaagaaatgttacatagactataaaatcctaatttttaaaacaatctggttcattgtctgaagggcctcatttaacacatagtctctgtacacttggtaaaaatcataaaatgaaattattcaacgtaactgccatatcagtgggactatttgtttataagcaaaaaaacattggttctaacttgtgaaaaaaaataattcattagaaagatatgtgggcacctttagcttgaaggggagggctgaagactatctttgaaaagggcaggacccaggacagttctgcagggcctcagcagcaggaaccctgcttagtttgatccagacacccttagaacctctaagtggcttcgtttcgatcaagtgccagtcccttgatttggttataccaagccatctgcttaattaaccccacaaagcaggtataaggaggcagagggaacttccaaaaaggactttgaagtgctattgtcaatagaaagtaggcagacgttgctgagagaaaaaaatccaataaaatttctgtgaataaccagtgttggaaagagtgtagggggggaaaaaaataattgcttcgccactagagagatgtaaattggcataaattttccgaagggtaatttgtcaatttatatcaaaacctttttacaatgtttagatcctttaatcaagcaattccacgcacaggaatagcggctgacgacaatcaggcaggtgggaagcaggcttactagaggctcaaaatggtgtttttctgtaattgtgaataaatgggagaagaaaaatacctaacaatgggtattgcttaaattatagcaaatagacattatgacagggaagcctaggctgtgctactgttgctcattggtcaaggaaaaggtgcatgcacgtttttaaagaatggatatgttaatttctgaagcccaagacatccctgtctaacattccactactaattgcatttctcctcctcatttaattttaattaaacctttccttccctctctccctcccttcctcatttcttttttctcttccttcccttccctcccctcccctcccgtcccctctcctctcctctcttctcttcctctcccctctcctcccgttttatcccctccccttcgcttttccctccctccttcctctcctctcctctccttccctcgctctctttgtctttctctctttaatcttttttccttaaaacaccagcaatcacacatgttaaggccatattatgtttcaaagaaatacttgtaggctagcttaggaattctggctaattatagccttgtttggatagccagaaaacaacaacaagaaaaaaaaattgcaaaatttctgggacttgactttagatacgctttgtaaacatgatttctatctcctgtacaactgtgattcttaaagctaaatagtgaggaatcctcatgtctaaaaatggaaggcttagagttaggactaagaaatgaagtccttatcactggcccattttaatctgtgtttgggtcttgttgaattcgagctaagggaaggggaatacttcttttgcagggctcaggaattaaaagttcagctctcacttttctcaccaaggttatcgaccagcttctacaaagccaaatatttgttttctaatgaaagtgttaggagatttggcagagtaaaaacgtccttgcatctagaaaaactggcatgtgttttctttgaatcaatttccaaagattatgcagtatcttttaatggcactctggggacccacagtgtgtgtgtgtgtgtgtgtgtgtgtgtgtgtgtgtgtgtgtcttaaaaattaggatgaacattttatgtctcccaagtagataaacctctgccctacccccagtgaagagatcataaagcacaatgttattaattcagaagtgatgggagggaatgccataattccagagatgatatttgttaaaatattgatggcttaccactttcccctgttggattaatttttacccaagctggccatttatcagaaggtacataatgccatcgtattgggaagatttttttttgaaagatatttatgaagacatcaacttcagtcaatgaaattagacagttaaaagatggcaaaatatgctttggcttagcataaggaaagcaattctggatgaagctgtttctattaatttagctgacaggaaagtgtgagggtggcttgtaaagttaaatatgacctgttcagaaaccataacttgggttggcattcagtaccggggttaatactaataaccaggttaatctttaggtacagtacctaagaaacagtgaaccataagaagggatattttggtaaaggagactgaattgtgtcttcttctgcttaacccatttttatgccttccatgtgcactgataatgcaacccaaacctttgccttgacctgcaggttttgtggggtatagccccttcctgctcacaaacttctctctctagccacactctttgtttctcttccttgatcccacctaagttcattttggactcggggacttcgctttactcctggctttgggatgttgtccaggttctttaaagaaccagctccttcttatcttttaggcatcaaagaaccattgtccatcctacataagaaaactccttcctgggagtcactagcatttaatacgtttattcatatttactgctctttaaaataatcttatgtgtttgtttgaattgttcaattgcctttttctgccaactggaacgtaggtagcatggggtgactgtctttgtcctgcttactcatctctctcttctcagcatgcagaggaatatctgataaagagcaagtacttgggaaatacctgaggagggaaggaagagaagaaggaagagacagagggagggggggttagtactggcaataagttgataaagctactagccatttggacgacagaggtgtttagatggtttggtgtggggctgaggggcatcggaagctgtgattttgattgtgtctatgaacttggcaatgttaacggtcattgaacatgggtgcacattttgtccaatgcagtgaagaactctgaaggcagctccagtctttcagtggggtgtgcccatacttgatcactatcaccctatgctaactggatgactttggtacgctacttacccttttttgaccttgcctttcagtctgtattatgagtgcatctgtcaaatcagagattttcacattctcaagattttatccaatcttcaaatacatcataagtatgtttgttttaatgtcatgaattgttcaaatctgttaaagaacttcaaaattatacattcatcagaacagccacatagccccattggttgactataaaaaagcgactattacatcctcatgaaatgccacttatttagttacattttgaaggtacaggtaagattttctttgaaaaaaatgtgccttgctaccacagttttttatatttaatttttatgagtacataataggtatagatacttatgggatgcatgagacattttgatacagggatacaatgtgtaatacacacatcatggagaatggggtcttcatccctcatgcatttatcctttgtggtataaataaatccaattacactctttattttaaaatgtacaggtaagttattattgagtatagtcaccctgttgtgctatcaaacactaggtcttattcattctatttcatgtacccattaaccacccttatttcctcccccgacactacctttcccagcctctggtaaccatccctgtactctctatctccgtgagttctatcatttttatttctagatcccacagattagtgagaatatgcactgtgtgactttctgtgcctgacttatttcacttaacacaatgatctccagttcattctgtgttgttgcaaatgactgtatctcgttcctttatatggctgaatagtactccattgtgtgcataccacacttgctgtgtgcattcatctgttgatgggcacttaggttatttccagatctttttatggcagcagtgtttaccgtagttctacaaactcactttcgaagcgtgtttgtcttccatgttacctcgttagacatcaagttcctagtaaacatttaggatgagggtaagggtaccacaaggttgtgggcacagtttttgagtttgttttgtgttaaaagggcctgtggaggattgtgtttgtgttctgggactgccataacaaagtagcacagacttctctcacatttctagaggcttaaagtctgaaatcaagatgtctgctgggccatgctccctgtgagggctctaagaaggaaacctacctggcttgtccacagcctccgttggttgtcagcatccttggcattccttggtgtgtattgtcattgccccaccttcttcctccatcacctggctccttctctgtgtgtctgagtctatgtgtctccaaatctccctctctttataaggacaccattccctggatttagggcccatcctgagccagtatgacctcatcttaactaattatatcggcaaggaccctatttccaaataaggtcacttctgagtatctgggtaaacataaattttcagaggacactcttagtacagagatcttcatgttagtgggaataggctgggttactgtttgtacaggacattccctccctccacctaaattatcaacacaaaactgtaaaacagagatatttggtcaacctgtatttattgggaattgcttgcaaacatcctgaactatagtaagtgttagaaggcaaacaagaagataagaacaattctagcttgaagaactgtgtgatgtcactgaggagcaaagtggcactcagagaaccactgcagaattatcaaatcctaaacttactggggagtatgtgatgttagagtttggagaagtgcttgatgaatttgggctggtgtagttgagtacacttctcctgagcaagagcgtgagctgagccatgaagcattggtaggaccctggagacattgagaagtgatgctataaggtatcttaaaagtcaatgaagatgtttgtgctcaagtcaggagcaaatgcatgtttcactttgttggttggtgctgctataacaaaacatcacagactgggtaatttctaaagaacagaaatttatttttcattgttctggagactgggaattttcagacttgggaaatgtcacatgaaggcaccagcaggtctggtgtctggagagaaccccgtctctacttcctagatggtgtcttgttgctgtgttcactggtgggaggaacactgtgcttttaggtggtggaaaggagggaagggctgaaaaatggtcttactattgtctccagcaattttatagggtcatgaatcccattcatgagagcttttctcccataacttaagcgcttcataaaggcaattcacaactaagtttgaacacatgaattttgaagtagacacaaacattcagaccatagcacacaggaaatgcctgtgtctgctacaagcagagaaaaaaagcaagggaactaatggtggctgaatgcgggaagtaaaggtcaagtaaaaatgaccccaagatatccagtatgagattgggaaaaatggaattaaacacttggaaatggtgttctcatcacttacatgaccaggttttcattccttggatgtgcgatagggtaagaagataaagtgagtcatggaatctttacttgaaatgcaattcaataaacatccacctcaccaaaccattctttatttcaggactggatgaattaattcgagtgtttaaaaaagagggggctcaccccaatgtttctgccaccattgagtaatagagtattgggtttcctatcgtgctgttatgattgggacaagcggagccatttgtcttttgctacatgggagaggtgttaataccaagcacatccagttatgttgtgaaaggctctgttgtaattagtctgagtcgaatcatcaatcaagagattctgcaattataagcaccagtcacactacattgctgtagaaggcggtcattcatgctacagcaatacttgtctattaggtctgaggctagatgctttatacacaatatctcatttaattcttaatgaaataccctaagagggccaggcacagtggctcatgcctgtaatcccagcactttgggaggtggaggtgggcagatcacgaggtcaggaaatcaagaccatcctggctaacatggagaaaccccgtgtctactaaaaatacaaaaaattagccgggcgtggtggtgggcacctgtagtcccagctactagggaggctgaggcaggagaatggcttgaacctgggaggcagagcttgcagcgagccgagattgcactaccacactccacccttggcaacagagcgagactctgtctcaaaaaaaaaaaaaaaaaaaaaaaaaaaaaacaaccagaaaaacagaaatactctaagaggtaggtattattactatccccatggtacataaaagatataatcacagagagattaaataaatcacccaagatcacatgcctgtgcattcacagaagagaaattcaaatctggaaatccaacttaaatctgcttttaaacgttattattagccgcctcccaaaagaatttgactatatttttccattagtctctttgtacccattgcctttctttttaaattattttatttattattcaatatgttaaaaccttttaaaacattcaaaaatataaaaagggatatagggaaaaagtaagtctcctatctacctatgatctctgactccacatttccctttccagaagtaaagacgcgttaccagtttgttttgtattttttgtattgtctgtatattttcagaaatgtgatatcttaggtatatactaagaggggtgtgtatgtgtgtgtatgtgtgtgtatcctctccttccttcctcccccaacaaagtgatttctgtacaggctacttcgtccttccccccatcacttaatgtatttttggggcttgggggtgtctatgttgccagcctgtgaaacacgtggataaatattcaagttgaatgtataatttttatggatttttggttatgtttctgtctgttcactgcctcattcaggccacttgaaacacatttttgttttattatttaggaccctctaaattgtaattgcatgcacctgcaatgatgtggaaacccccttatcttgaggactggtcttgattgtgttcaaagccacatatttaaggagactggagagcctgtggtttatcctcctgagtcagagcctgaaatcgttgaccctaaacccagagtgttttgtctctcaccttgtgggcgagttaatggttgccactccgagctgctgcctctgtagggtagggacgtgtggatgcacacagcagaggctctcataaggataaaggcctccttatgcacaattcaaaagagtgaccacacccctcagtcacgattccatgctttatccactttcttcctttgttgtcccttttcccatggcatcgctgaaccgtcatttcctattcatgtttcatgctctccttacctgtgtgttgatttgcatggatttctctatgttgaatttccttctaccttacatcctttccaccctcaaagatcaacaaaatcttgtcaccttcaggaaacctttcctgattcacccaactggaatccttccctttcttttacctaaaccttgattctgttatctttgtcttcggcacttttatcctccccccataaattgccctgctcatagtagttgctcaataaatatttgatgccaatcccatggaaataccagcatatgtgtgcatgcccttcaactctcagagacaattagacttccacttcccaaacttaggatgcctcactcattagagaattgacaagctgcctaactgtttgcacagtctccaacacattataaatatttggataagtccaccatcaatgcacagtcattgcagagccaataaaacatgaccttgactttctcctgtttgtttacatgcaccctacagcatcatctccaaaggcaacaggagcaaatggtgaacagctgggcaaaggaggtgtccttcacacgtcctatatttggaactggtggaaatagccagtatgattctgtgtcagtttaacaggatagatacgattttaaaatgacatcttcattgtgaaccagctgtgggcaggggctcatcttgatatcacttgtgctaggctttgagtagggcagagtttctcaaccactccagtattgatatttgggaccagatacttcttggttcaggggagctgtcctgtacactctacgatggttagcagcaccttgcttcaacccactaggtgacagtagcattccacaccccacctcccatccaaggccaggttgtgccaaacaaaaatgtctccaggcattcccaaatgtctcctggtggaagaaattggtgtaggggccagaggaatatttattaaatgaacaggtaaaattatccatgtttgaacattatcaatttctatttctctacatgaagaacaattaatcctccttggcaggtgtgcaagagaaacgcattttactcaatacctaattaattggttaaaaaacaaaaaaacttcttgtaaaccgcccccaaattctagctgccaccttgttatactccgaaatgtggtgaatttgtgcctccatctgttacccaatctatataacttgacatttgctaaaaagtaccctattaaagagggttgtttttattgtaaactacttttcaaataaaagcatattgcattgactgtaagttctactatgcataaaaaataatttaccctgtccaggcacggtggctcatgcctgtaatcccagcagtttgggaggtggaggcaggcagatcaagttcagaaggtggagaccagcctgaccaacttggtgataccccatctctactaaaaatacaaaaatcagttgggtgtggtggcacacacctgtaatcccggctacttgggagactgaagcaggaaaatcgcttgaacctagcaggcagaggttgcagtaagtcgacattgcaccactgcactgcagcctgggtgacagagactccatctcaaataataataataattattattaataatatattattatttatcctaaatgtaacattgagtcagctgttttcactgatagcacagctatggtatgaagtaagatactacaggtatattgaaataagaaccattagtgatttattgctaaataattgcatagactccacaacacgtacggaagaaggtgtttaaagttctacaaaacgccaagttgtagtaacacttgagaatctgaactgcatgtcttgttgatatttctttaacatttttattaaatattatccctagtttattgaacagagtcagctcagtgagatataaacatgaggtgactttttctccactcactgctcccaaattcagaattgcatattcttccccttcccctagaaataactcagatttttcaactttctggtcccttttggttattagatatagtctcaatgggtatttatgtctctgtcattttctctttcaaagtagctattttacaatgtgtttaaagtttcttttcttcccttgtcagtcagacttgtagcttccgaaaaggagacagtgtgtggtgtttttctttcctccccttcttttatcttagaatgaagagggaggattttgtatgactttggagcattttttcctttcttcttccggccctctagatctgatggagtttgggggcaggaagaagcggcaaagagtcatagctctcaagctcaacagtgtgcttgcattcctcttatttggcatggtaagcatgagtgagtttactgtcactcacatagttccagcagaaacagctgagcttgagccagtttggtgctacattccaagaggctcacctgcaagatggggagacagtgggctgtagcaacattgttgctatttgtctggtttctttgttgtaaatattcaaattctttctttctcacgatgcataactatcacagatacctcaaatagacatgcaggggcttctttgctccttgtattagtctattttcacgctgctgataaagacatacctgaaactgggtaatttacaaagaaaaagagattgaatggattcacaattccacatggctggggaggcctcacaatcatggtggaaggaggagcaagttatgtcttacatagatggtggcaggtgaagagagagagcttctgcaggggaactcccttttataaaccgtcccttccccacccccatctcatgagacttattcactatcactaaaacagcacgggaaacacctgcccccatgattcaattaccttccaccggatccctcctacaacatgtgggaattgtaagagatataattcaagatgagatttgcatagggtcacagccaaaccatatcactcctgtttcttgatttggaagatccggctccagaaaaaccccaatcacctcccttcctggtgtctgttccaaccatgcatcgcacaggccattgtcccccaccttgcaggtgagcctcttgaaatgtactagcaaactggcccaagctcagctatttctactggaactgcatgagtgacagtcaagtcacttgtgcttaccatgcccagtagtaggatccaggttgtttccctgcttcccttattcccactctgcccccggtttttcccaaattctatttttctccagcgctcagggacatctctgagacagccatcaagtttgctgtgtctgtagacttctaactggggaaagacatttcaacctccccttgttgcaggagcctctggtatttgcaggtacttcacttagcatggactcatggctttgtgggtgagctgaggagcaggtaccagagctctcagacataggatcagttttcttaagacatcttactcgttgctagattgttcctaagacctatggatgtcctgattatgattacatttaggacaggttctcatgaacgtgggaaaatggtgaaatatttttacttttcatagtttttaattttaatatcattggcttttggaaaatacctattgttttaaaacagctacctagggtttcaataaaagtggccttaatgttctattcctcagtgtacgaatgacccattctcggagcatatgttgtctagtagcccttgtcctgcctttctaggagatagagtttctcatggacccaaacagggcttcttaatggagatttataacatcaaaagggattacatgagaacaaagtaattatccttcgtgtatgagtatcaacccaatttacgaaggagtgaaattagacactgcagttaattacagggacagtctcaactttgtggaccaattagggctcattggttgcaagcaacaggaaccaattccccttctacattaagcaaaaagaatacttattagcagtagtcagtgagcttacaaaatttagaggtagttgaaaaagcagtgttggtagcatgacaggcaccaagccactgtgaggtctcctccatgggaagaaatgaattccaactaagtcttccgtccatgtatcattctgctccagttctggatcccagaagagcacatcccattggccagacttaggcaatacctccccttcttgagctcaccctggctgggagagctaagatgtcaaagaaagttcctttaggaaactctttatcttccagagtgggaaggcaaagtacccaatgtatggtcttacaaaggctgcataaaatgggggagctgtaacttctcttgggtactcttaggaaaaggaagcaccaaccagtgagcaagtgatctccattcccttttcatagagaaggtcgatttctatcctcttgcctggagggtttcagagctgccctaggctgtactccactccagggtggccctcagagaccattactgtttcctcatttcttgaatgtatggaggaccctccagttactttctgctttaaggcgatgtttattaaacattgtttctattagggctgtgctccttcctctgtaccctttaaatattcatctccctcatgctgccatccccttcatggagatcattcctgcagagcggtagtccagtttgctctacttcctggtgatcgtctcttctcgagatttcttcctgcacatgcacactctggactgtgcacttttctgctctggattcctctcctggacagttgcactggactccattcccatttgtctgagcttagggtttatgtctttttagggcatttaccgtccccactcctgtgttaccgtctctctgtgctcctagcatgtacacattgtggaatgtgagaaggcaaagatctcagactttccatgtgaattgaagacccttctctggccccttgagtgccagtgtcaccaacaccactggtcactctcctctcactttctacctgtacaaaggacagtctcccagtgtccctgtggaacattgtgattactcgaagttgtcctagctacttgggaatgagtcctaagaagattcatcttacttctgatgcatcacatgctctgtgttgcaaagcacacttggcatagccaggagcatcctaggttggcctagtgctagatggcaggcattgaaaactgtcaacaccagtacaggaacaggaaagacaaaccatggaactagatgagaccctgatactgagttgtggacagatcaactatagtgatacaggattcttgattgtctgcaacagagaacttttctaagtaacctatgcacatgataatttgatttgaatgcttttggggagaatgcagtatcatcaggaaaatttgagaacctggctcagaaaatagacaaaagggatgaaggtaccattaggatccctgggtagaaactccctgctaaggatgctgttaccagcactgtgatcactgccacgtggcaccaccagcatccatagtcctgaacacagagcagtggttctggactctacacttgacacagcctccagggatggtgcttgattgatcctgtgcttttacctagccccttaagacccaagacatatggtaacatacagagtcaagtgattttttttttttccttgaaaaagcaccagtgcaatttgaggaggaaaagcaagtcttttcaacaaataatcctggacctactggatgctggaatggaaacatttaactcagatccatgttttccatcgtagacacaaattaactgaagataggttgcagacctgactacaaaagcaaacactcgaaagcccctggaagggaacataaacatctgcctttgaaaactgagcatggtcaacattttcccagataaaacacagtacgtactaaacataaaagagaagtttgacagacttcctcaaaattaaaaactttgtcccataaaaagacattaagagaatgaaaagtcaagctgcaaggaggaaatataacaatgtatattatatatatgtgtgtatatatacacacacacatacacacatatacatacatacacaaagagctgtggctctggacttaaatattttatcaagagaaatgaaaacatatctgcacataaggcttcttcagagatgctcattgcatgtttatttgcaatggcaaaagaagaaaaaagggaaattacccaaacatccatcaataaatgaatgcataagtaagttgtatagtcactcaatgaaatgctatccagcaataaaaagaaatgaattgctgacaaggacatcagtgtgtatgtgtgtgtgtgtgtgtgtgtgcatatgcgtatgtgtataacatactcagcaagagaagttatccaccaaagagtccatgctttatggttctagttttatgaagctgacgaacaggagaaattggcctatggggatggaattcaggatagtgattgtctttcacccgctaagatgcctcttcagtttctacccaaagacttcatatatatttacctctaggctgtccacaaaatggagatgtgtgaatcatgcttttcatgccattgggaaaggacatcctgttcacagcagaggtgatacaggagcattaatcaccaaatgtttagtaaatattgatacccgggtgatttacactaatcgtcacaagaccgcaatctaccttttatataaatgcaataaaaaaatcttggttataaaagtacttgcttcctttgcattttttctgctgggggagaagcacagaatgcaaagagggagaagggaattttctaaggagatggcatttctatgcactttgactggggtactggttcatgtatatgtgtgtgttggcaaaacaccatggaactgtatacttaagatctgtgcagttcatgtaattacacatgaatgaccatgaaaagtccaatgaggcatatcctagtggtcaagcctggtcatatgtgcgcattcaacatacagaaaacttgtttggtttctgtagcaggaggtatgagctttctgcaaatacaaatggtatttgaaggaaggacagtcattcatgacacaggtctgctacagcattggattccgcatcctgcagcaaaagccaggttgggaccatggttgggatgagattccatgggaacaagccaggagtgaacaactgcagttagagtggaaaacgtgtgctggtttgtctgggactttttctgtgtgagcactcaaagtctcatgtcctgggaaaatcctctgttctaagccaactgggagagttggtcaccttctttccagccagagctctgtctaaagttacatctgatggagaaattgagggatcacactggaaaaagtgaacccagagatttactttgaagctcctctgggtatgaggtcagtgtgggataattgtcatggacgaagattcactagaagtctcacaagccctgccaccctaaatcacatcagaaaagaacccctatgcattttcttttcataccacccaacatcctaaaaccatcagcttagtgttttcactcccattccctataaactccatgtggtttgttcacatgtcaggtttattcgtcagtgtatctttagcacatgtaaatggctgtcacaaatgcttaaatgattcagtgaatgattgaatgattcaatgaatgatcccatccatcaaccgttgctccaggcttcttgtaaagaccaggatcctgacccatggacatttttgaggctttaagccacagcccttcgagcaagggctggaaggaagcctctttcatctttctctggggctatcacaaccagcatatgtgtatttaattagtcactgcctatttttatatgttacacaagctcagtttctccctctctgttctctttttctcaatagtggcaatgtagattttttaaagtttatttttcagtttcttcccttttcctgcagtctccctctagagatgacactgactttaaactttgacccactaagatgcctctttagtttctatccaacgacttcatatatatctatctctaggctatccacaaaatggagatgtgtgattcatgcttttcatgcctttgggaatggacatcttgttcatagcagaggtgatacaggagtattaattaccaatgcttagtaagtattgatacccaggtgatttacacaaatcatcacaagaccacaatcatcacaagactacagtctacctcttgtataaatgcaacccaaaaatcttgaattataaacttacttgcttccttggacttcagataaatctctagtatcctcaagagtctttgaatactttcctgtctccagcaaatctcgtgggaaggaaaaaaatagatatcactttgcaatttatgtttttaccagcatgcaattgagtagattcaattgactccaaatgttttgcacattctaatttctgtcccctattgtcctcccctgttgacttcaagttaatgcataatatgatatgggacatccctcataaattccgtatcatcagagtaatgtggctttgatgatgtactgcattttaaattagctctgtcacaaaaggacgatggggggcccaggaggttttttttttctttctaattttccttctgttcttgaagtgtgataagtctaattatagttggcagcaaacagaagtgtttcttcagctagtatggcttgtgagggttcttggattgctatgatatcttcagatttttatagtaggtgtcttagacccaacaagtcaagatggcttctaagtggaaaggttttaaaagattaaagagagattaacaatacaagaagttagtaacattgatctgtcatggccaagttcagtggtgcattcctgtggcttattttactcatgggaattaaataatgataacattttcagaatcttagaataatttggagaagaggatatgacatatctaaattatgtgtatacaaagtaatttttgtttcttctaatactctactagtctaaggggattccttcctatccattgtcttttctggggaaagaaaccaaatgtacagtcctacgtacggtaggaagaatagctatagctcctctcagctctggtataggaaacatgctctaatgaattttccttccagcgttccataccagtgtttctcaagcttttagtgagcacagggatctttccaggaatcttcctacaatgcatattctgtttcgtaggtctgggtggagcctgagattcggcacttctaataagcttccaggtgttgttcctgatgccggttcgtgcaccagaatatgaacagcaatattttatagggtgttaagcaacagaaatgtatttgtacgtggatgtctctgcaatagaattgcatccagaggagaaatgaaatagcttacaattatggatgaattgtgtaggtattcatatagaatagctaacataaatggagccatgcgtgtattatttaacactcacaacagtatagatagacacagtgcttatctccatgacagagttgaggggctataagcttacagatgtttagtgatgtgatcgagttgctgagctaacactcagtggagtttgaacccaggcagtatgatttcagagaccacgctgaagtatctgtactgctcatggactgttgccctgaaatgcagtttatttgtctgaagtgtaatgtctggagttttttgcatcttcatcattataaacctcttacaaatattaattgagttccttaggccattccttaaggttttatagcagataagagaagataatgtggttccaactgaagaccaccaaatagtgctcactggtagctgaaattcaggaaatgatttacatatccagcaggagtgattttctttatatatagaaaaatatatttaaattgagttaaatcattatctgtagtaattatagctgaatggaagaaccggcctaaagagcaagatttttttttttaataaaaaggatatcctaggaactctacagtgatttgcagattaattctatctttgtttatatttctactttcaaacttttttattcaggtaaaattcacataatataaaatacagatacataatataaaattatataaatataaaattatgtgaattgtaaactgtacaattcaaggacattagattcacaatgctgtgcaatgattacctccaataagcatgtggaaatatgctcaacaccattagtcattagagaaatgcaaatcaggccaggcatggaggctcatacctgtaatcccagtacttgggaggccaaggcaggaagagtccttgaacacaagagttttataccagcctgggcagcacagggagacctcatctctacagaaaataaaaataaattagctgagtgtggtggcacacatctgtggtcccagctacttgggtggctgaggtgggaggatcacttgagcctgtgaggccgaggctgcagtgagtggtgattgcgctactgcactctagcctgggcaacagagcaaatctgtatctcaaaacaaaaaagcaaaaaatgcatatgaaaatcatgaggagacatcatgccacacccactaggatgacaagtaataataatagtaataacagaaggtaacaaatgttgtccaggctgtggagaaactgaaattctcaaatattgctggttggattgcagaatggcacacctgctgtagaaaacggtttgggagttaaaccaaggtaaacacagaattctcactaacttttgacgactgaatgtgtttgcctttttccagctgttggttgttttttttcatggcttcttccagggcctctgtcttgtttgctaatatgcggttctttgtcctgtatccattcagtagccaatgtaaaatggtgccaaacttactattttagattgaagggattagctcctctttccagtgattttaccattgtctgttcttagctggtgccaggttggaaagggaagagttgttggctggtttgttggtgtttttacctccaggtactgtgtcattccaatgttatttttactgtctcatgtggagtgtcctatatgatttgaataaaagtcccactccattgctgtctctgcaaggctgactcctttgaccctggcagaaagaacagttgatgatatttggtgaaaaaaaaaaagaaaatttgcccatggtatgactgttcttctccttggcgggaaacttctacttgaatcattgtgcagtatgatggaggcacttataggtttaaaccctaattatgccacttggtagtgtgtataagcatgggcaggtccttcaatttccttgtgcctctgttttcccaaataaatcatggaatagtacttacagaaatggctaatgattaaataagataatgcaggaaagcatttagcgtagcatctggcacacagcagcactccacatcaacgctggctgttattgtattattatcatggttacttctgtcctagtttttactctattacatagtttgggtctatttgcacaatatacttctttaaaacacacacgtacagtcaggtgcagtggctcacacctataatcccagcacattgggaggctgaggcaggcagatcacctaaggtcgggagttcaagaccagcctgccctacatggtggaaccccatctctactaaaaatacaaaaattagccatgcctggtggccagcacctgtagtcccagctccacgggaggctgaggcaggagaattgcttgaacctgggaaatggaggttgcagtgagctgagatcgtgccactgcactccagcctaggcggcagactgaggctgcatctcaaaacacagacacacacacacacacacacacacacacacagactttagaattatctcattgtcttcctacaagctgtctttttgcttctgcatgaacttttaaaccttctccaccaaggcaaggtaactttaaatggttttccccacagatagccagccaatgaaaaaattaccaatgtcttaacagaaaggaactttgttactttcaggtatacacagcaaccctgcagttcaacagtctctgtcctgggtagggcctcacgtgacttgactttgatgaaatagagaagcaggctgccctctgtcagttgaagaacccatgtttttagcataatgacctgattctgtatgtggcttggggaatcctatttgtgaatctgaggtctatctttatgttaatgattcttcattactttaacattcttgaaagtaggttttggccttagaatttgtgcaattctccctcaattgttctttattcgtagatagccatcatataagctggctggctgtaaaaaaaaaaaactcaactcaggcctagcgtggtggctcacacttgtaatcccagcactttgggaggctgagctgggtgggttacaaggtcaggagatcgagactatcctggccaacatggtaaaaccccatctctactaaaaatacaaaaattagccaggtgtggtggcatgcgcatgtagtcctagctactcaggaggctgaggcaggaaaatcgcttgaacctgggaggccgaggttgcagtgagccgagattgcaccactgtactccagtctgggcaacagagcgagactctgtctcaaaaaaaaaaaaaaaaaaaaaaaaaaacctcaagtcagtctctgtacagacgtttcaagaatgcctaatctgtggtgtctgtgttgacaaattcttatacaatgctttaaacatattcagattttaaattttattaacttacctaattattcacttaaagtaactctttaaaaagactggcttatcttactctagctgtacttttttttgctagtgaaactaccagtggattactttatctcagattgtattcatcatatttctccattataaatccgttaaaatgtcgtttctctgacttcttggagttgaggtctgggattatctgctatcagaggaaattcctgccagaaccccctagacatttccacattgcaaagcagcacgaagagcaagcatgagtgaatcaagttcttatataaagagggatcctaggataatgctacttttagagatggaaaagctctaagatatttccaagtaaaagaaacctgtgtttcagagagggaaaataacctgagtgttcacagtgagttggtagtaggacacagatgagaactctttcattctatgcggtaatggctctaggtcctcctgtcttaggctctgaagggagacagactgtagtctctcctggaatagcccgggaaggaactttgacatgaagatattcaacctcccaatggtagaaataggtgactctggcattcattcattcatgtaacaagtatttatggagcacttacccaatgccagacactgttctaaacagaggttatggcagtgagcagcactggacagttccctgctcacatggagttggtcacagtgcagggatcagacagtgaataggtaagtcagtgatctgccgagaaagatgacaacagtgtcacatcagggtgacgtagtagtacctgagatagggcatagtgaatggaatattttttctaagcgcaatggaaagtcactgtagagttttaaatagaggagggataggatatgacttatgttttaaaaatctcagtgacacctaggtggaaatttaattgtaggaagagcaagaatatcaattctgggcaaatgctgtaggtcagagatgatggtagctgctaagatagtagctgtgggcaggagctaatgatagaggaaggatactggacataaatatgaggactagaccctagacttagtggaagaggtgagcgaaaaagacttacaaacaactttaatggttcagcttgagcatctgaacagattaacccaaagagtttacatcaggctctgtgcagcaggtagtgttcactgctttagtgttcattgatttacatctccccctttttttttttaattaaagagattaggtctcactctgtcacccttgctggagtgcagtagaatgatcatagctcactgcagcctcaaacctcccatctcagcctcccgagtagctgggactacaggtgtgcaccatcacacagagataacttttttttctttagagacaggctattgctatgttgcccagcctcgtctcaaactcctggcctcaagtgatcttcctgcgtctgcctctcaaagtgctgggattacaggtgtgagctactttgccccaccaacatctattttaaaaataatcttgagatctataagccattcctgaccagaggtcagatacttatctgtttcttttctctttcttgagtagcacctcacacagggctggattgtggggtgttctaaatgcaggggtgaggcaggtgtactggagggttttaccccatgtgtgctttcctctgagctcaacaactgcagctaagaaaggtgtctcagtggataatcgcatgatccactgccctgtgtgggaccatagtcttttttttttttttttttttttttgagcaggagtcttgctctgtcacccaggctggagtgcagtggccttttctcggctcactgcaagctccgcctcctgggttcacgccattctcctgcctcagcctggcaagtagctgggaccacaggcgcccgccaccatgcctggcggctaattttttgtatttttagtagagacggggtttcactgtgttagccaggatggtgttgatctcctgacctcgtgatctgcctgcctcggcccccagaagtgctgggattacaggtgtgaaccactgcgcccggccgggaccacagtcttaagacgctggctctgccttcctgggtgccacagttaccatcttttgtaagtctgtaaacttcattggcctggcattgacttcctctgggtacattagtggggaccacaccgtgctgagtcacagttagaaggggcgtctgtcttcacagtgcggcatcactcttatcctggatgccctactctttatcattcctcctcctctcactctccctccccagggccacactatcgtttggcagtaatcacatccaagccaattttgatcaatagttttgttcatttcaaatggaaataagctccgtgtttagcagataaggagagttacactcaaaatgtggcacatttgtaccccatcccttaggtggaacatggcaggattcttcaggagggaagaggatgcactaggcttaatgtttaacattctttggatggcgtctcctccatgccaccgttagctgtgagctcagcaactctgggaattggaacagttgcccctccttgagactctttactgcttgtgacttgacacaatggaagggcagatttccactgagtctctactcggtggcttctcaaagacttccactgagactctgcgcacctttattgggttggcctgattcaagcctgcttgcagaggcattttctttcttgactctgacatgtggctcagtttgggaacccacttgttccctctctgagatctttccgcctgcattttgggctttgcgctttttataccttactgtggctccaagaaggcctttactgctgctttgggttgttttgctgttgttttgttttccacttagatgccctcccggtctggaagatttttgcctggttggaaagaggcaccttggcaggggaggagagaggagaacctacgggattatgtggaagtctttccccgaggttcacaccgaagcatcttagaagggttagaatctctttctaaacacttagtaagacacgttttctgaagtgtcactacagagtctaccctggcagaagaagccacatctttccagatacacctgcatgaaaaaaaccaaaagaagaagaaggggaacccaggaaggataacacgagatagaaaggccatcttggcatttggggaataaaaagtataagggcattttgcttttaaatctaagaaaggtataaagaggagaaatgttgaaaagcaccttgtctctggtttcttatgtttgccaaatattagcaagtacctgagatgctcttctaggtgtctgtcttgtgtgccatctggcccatgagctgtttgagatgggagagtatcttatctgtctttgcatccccagcaccagtagattgaaccgagtaacttccacggtgctcatcccaggggcaacaggccctgttgaacaggcattcactttatggtacttggaccacacttggtggggaaagaggtacttcttggccaccacaggtgtggttgcaagaaattagcctcataactttgaatggattcaaatcaagcatatctagagcatagcagaagtgtcatcaatggtggaaaaccaccttttcccctcttgcaatctgaggaacacctggcaaacatttccacctaaattagttcttggcttcactggtccagcttagttgaacggatgttctgggaggcactgtaatttcctgttttgtaggatctcataggaaatttttcatgtgaattcaactctgatctcttcattattgattatatgcaactcttggtattgttttctcttagcattcgatcgtattgattcaaatgctgttttcattaacttcatgggtgcatataagagactggatggatttgaggatcataacttcagtttcgctgactgcgtatccaccccatactaactgtgggactctatataagtttgtcttttcaaacctcagtttccttgtttgtcacatggagatgataacactcctctctcaaagatattgtgaaaattgaatgatgctgagcacgtagattagtcagcgaagggtacccacgaccagtgatattatgatggggcttgatccaagttggaatccgttacctttgcccagtaccattgtttgcacatgtctgctttttatgattattagttaagagtttattttcttacagaggattaggcaaagggtgattaagcataggttattcagtttaaactaataaatcttttttttataggctgaccatctgtcagggaagtggcagaaggcattccaataggactgagttgaattaaattgggagataaaagtaataacaatggctttcctccaaatgatatctaaaaatccgcgtactttttccctagcgccatttttgccactttaatccaaactacccgcatctggactacaagcctcctaactggtctccctcttttccttgccttcagatccaatctttttgtaataggttgatccttttaatattcaaaacaggttacctttccccatcttttccccctcctggccttcaataaaaacccaaacgtaaaataaaaacggataacttggcctgtaatcccagtttcatctggcctcttgcctttctctccaacccctctctctctttctctccaggccatcattcttagggctttcaacaccctgtcctccatgtcatttctgttgcagccttggagacgtgtgcctctccttctgccagaggatgcctcctgtcgtggtcacttggcaaggtccactcttatgtcacatctcggtttagactctgcagaaacgcaattcccaacccctccgataactactctccaccccaaagatctcactgtactaattgcagatttattgatgtggtgcttgttaagttactcaccatggtgtccccagaacccatgttagtggcattgctgaataaaaggtgcttcaaactacgaagggcttataatgtgcattttcccacttgaggctgatggcatctttgtgaggaaggcatatagtggacagcctcaaagctataggagagtaatctaaagcccactctggtgaaaacttggaaatgttaagaatagggtttgaatcccaggtgtctgatgccaggcctaaagctctttcaacttgagtactgcacgtgctagatagtctctgtgtactgttgtctaaaacagggatttgcaatcttttggcttctctgggccactttggaagaagaagaattgtcttgggctctaaataaaatacacaaacactaacaatagctgatgaactattaaaaaatcacagaaaaagattataatgttttaagaaagtttatgaatttgtgttaggctacattcaaaggcatcttgggccacatgtgacctgtgggccatgggttggacaagcttggcctaaaaacgtattgtttgtctaggtagggtcatgattcatgaagctattgagcaagcattttcatggcactcatatcgcctgtcagactttgtcccaagtgcattgtaagctcttccttgcctaatctgcacaaagaccttgtaagatagggtattagttagtatcacaaactgggtggctaaaaatgacagacatttattgcctcaccattctgggccaaggagcccaaagtcagggtgtcagctgggtcatgctccctctgaaacctgtaagggaattctgccttgcttcttttgactcctggagtaatggcactctctggcatattgtgattggcagctccatagcacctctgtctgcttctactttcatgtggcattctccctggctcttttcacatcatcttccttctgtctgtgtctgtctttgtgtccacatttctccttcttataaggacacatccaccttactgacctcatcttaatttgattcctttctgtagattctttttgcaaacaaggtcacattaccaggtacctgaggttaagggtttatctgtctttttgaggggacatgatttaacccctagcggatacatatcctattccattttcacaaatggggtcataggctccataataggaccaaagattctgagcttgccattggcaatgacaagttcaaacacagatcatgcctccgaagtccatgcttggtttgtggaccacacagttttcaaacccttaaatcaaagtgtggtccgtagattcaattaactttcaaaaagtgaagtagggctctttttcttgactcaaagtgagcttagccaggagaggcagatttttaaagtgcctgagcatgcgtattattactagctttgcctgctgaagcagaaatgtgttcttcccctgcccaactctattgcattgagaataaagtatctggcgctcttttactaagatgcaagccattcttcattttaattggtggggaaacgtttattataaaatgctcttcccccagaatagttccctaaagtggcatatagtatctgttttttcttcctcctctttcttcctgggaatcattaccagccccggctggtgatttataatcacattcccaacaaatttcactgttgttaatgactacttattttctatacaaatgatttttgctctccttcctgaggataattaactaagaaactggtaataaattactgataatgatcagtttgtcagagatgattgtcgaatggtgccatcttccatagtaactagataaagtatctttaattgctgataacagaacagacaaattgtggttcttttttttgttgttgttgttattgagatattcatgaaatcttcctcctggaagtcaggcagaataacaccttttttctctgtctcctgagggaggggaaaaggaagaaacagtcatgacttacagacttctagaaatatagtaaatgtgatcgctttttgaggtttgtaataagatagctgatctttgtaaagcagagatcagagaaaatctactctgggatacatttcgtttagaccaggggtccttcctggtcatgtgtgatttttttttttctctcaaaatgtcatctttcctatttgcatctaaaccttggccttcaaatgtgacttctttgaactctggaaaggaatagtatttaattcacagtgtttctcacggttaggatgctgactaaaccccagactgcaagcgaggctgtgaaagacccttagctgggaaacgtagagaagacctatgacaatggatgtacactgaaagtcctttaatcatagcccttattatctattttcttattgacaagctcagactattcatcgtagtaagaattgcaggacctactattaacttcagttctttgaaggatacacatatttcacatactgaaggctggtttacatttaatccagttaaatgtgtcactttactgacatgccttgaatattgtgagtcttgggtattgccatcctttatttataatctccatcagtcttgtaaacttttgttttgttttgctagatgtcagcaactgtcaaaaaagctatagtgtccgagatcatttgaatcattttggcagtttagaaaacagagtggtgcttaaaagaatagaaatgagaattccaaaggcggaggtctcaatatcaaattgttggggggtatgtagtgtctctttgggctttttaggttttgttatgagaagggaaggcacaaccagcatagaattagaatgtacaaggttacaaggatgtttacacactgatttcttcagaatttcttcagttccaagtgaaaaaagaaatttttttaagtttcaagtaagctctccaggtagtcacagggatgacaaagatacaaataaaacacgaataaactttcaaataagctgaaggaaaaaagaattaaattatagaactgggaagcacacggggtagacttcaggcgcggttgagtcagaagatttcacgatgtcgcaagaactctgattctctcagatctgcttcctctcttggtaccaggcatcgttaggtttcttccacacgtagtcttcgagaagttagcatccttggctgggtgcagtggcttgcgcctgtaatcctagcactttgggaggccaaggtgtgtggatcacttgaggtcaggagttggagaccagcctggccaacatggcgaaaccccatctctactaaaagtacaaaaattagctgggcatggtggcggcgcctgtaatcccaggtactcaagtggctgaggcaggagattcacttgaaccctggaggtggaggttgcagtgagctgagatcatgccactgcactccagcctgggcaacagagcaagactctgtccccaaaaaagggaggagggaagaggaggcggggaggaaagagaaggaagaggggaggaaggaggaggaggagggaaggaggagggggggggaaggaggaggaggggaggtgggaggaggaggaggggaaaagggaggaggaggggaggagggaggaagaggggaggagggagtaggaggagggaggaggaggagaggagggaggaggaggagggaggagtaggagggaggagggaaaaggaggaggggaggagggaggaggaggggtggaggaggaggggaggagggaaggaggaggaggggaaaaaggaggggacgagggagggaggaggaggagggaggaggaggaggaggggaggagggaggaggaggagggaggagggaaaaggaagtggggaggagggaggaggaggggaagaggaagaggaggaggggaagaggaggaggagaggagggaggaggaggaggggaggaggaggatgggaggaggggaggaagggaggaaggaggaggaaagcattcacttgaagatactgcagcaaattgtagggaaggctttgattggctaatttgagtcatgtgcctacttctgagcaaatccctagacgatagggctggagtcttctgagtggctggtctccagcctcatgacctacagagtaaggtaagaatgaggggaatacagctctgactaaatgaaataggcagatgtagaatggggcaagggtggttttccaaagtaaaagattttaggtcgatcctaaaacaaaaggaaacacaagcacacagtagtagagagaccttctcatggacccttacgtactttgactactacccagctcagtttgctctgcttaccagttcacagatgctttctttggctggctttgcttttacagtggattttctgacactttttgaacattgtctaagaggggtgacagtttcaaatccacccaagaagtggacaccattccatactttatgactgaatctaaaatgctgttcacttgtgcctccagctgaaacatttttctcttcgctctgtttggagtccctctccctcccctctctctatctctcactgttcttcatggtacacttcttttttgggggttggcggggggacagagtcttactctgtcgcccagactggagtgtagtggcgtgatctcagctcactgcaacctccgcctcccaggttcaacaattctcttgcctcaaccttccaaacagctgggtctacaggtgtgtgccaccaggcccagctaatttttatattttcattacagacaagccttcaccatgttgaccaggctggtctccagttcatggcctccaattcgtggcctcaagtgatctgttcacctaggcctcccaaagtgctgggattataggcgtctgccaccatgcccacctaattttcgtgttttcagtagagacggggtttcatgatgttgaccaagctggtgttggactcctgacctcaagtgatgcacctgcctcagcctcccaaagtgctgggattacaggcatgtgccactgtgcccagccttcatggcacacttctaattctttccttcttcatgagctttttccagcatgagccaaaatcaatttcttcttctgcatccccactgaaattgttatacttcataaaatactttgtacctacttcagttttagtttctaagaatttatgtctttcttgagaaacagagtactgttttgtgattcttgcttcggcacttcacattgattagaacaatgcctggccctaaatagatatttaattctggtgagttcttcccagacaagtctaaaggagggtgtgaatactcgggcaactcaagttatcatcatttgggtctggctgtgttcacttatgggaatacaagtgtgggcattaatagtttggaggagcacaggagaacagtgagctgactgcagaggaggagatggattttgtttctcttgggggccccaggaattttgcctcctggacccattttatgtgataatggctctgcgttttgggttacagagctcaactctctgagattaacacaaagcaaagggcttccctgtatgtctatatagatctagcccaactcaggataagcagcttctcactaattcagcaaatgttgtgtagcatcagctatgtgttggacacatgtaatgagtaaatacatatgtgactgctgccctcatggttggagctttgctactgggatggtctagtctggggctgcctcttattaccagcggcatctcagactagttattcaacaactgtgtgcctaaattttcctgcctgtaaaatgggaataaagagatacttcacagagctattgtgaaaactaaaggatcgtataattttacgctgtctaacataagtaaccatttagcaaatgacagctattacttgtagctattggctcatgaagtctgcaggctggtagcacacacattcatcaagtgataatatttaaaatgtaaattatgacataattgatctgaaggggaggtgcttggtgttaagaacacttaaaataaggaattctgtaaaagcttgcctgggaatgtgtagctaatatagctacagataagactattaaaagattagagccaaaatgaataatgtatccatgtctgatgattgataataaggcagcagttgtggacagctgagatggtccttttccaaccgggacgtcagagctactgtgattatcatgccaattacatctcacattctgccaaggtggttcttctctctcagtgcgttggtcatttcagagtgggaaaagccttcagctcagtgtccttcaggatccagtctactctttaaatttttgagagttatttggatttcagaaggatttgcctctcatcttctagtcatatcccattaccagtcaattcagaacatctattagttcagcaggagaggaaaggatgaatttccatgcctcccacctttgcttggtaacaggttatgcttttagaaatcacttcatgacctactgcttcctgctgggacaataatgttcttgtgtgtggctaagctatgcccacatttttaaaagttggaacacatctagtaaatatacatacctttgaaagtcctcatttaagctgaattagaccagtgaatagagtaataatgaaagtatttgaaggagggcaaccccttttctttaaaaggaaagagaataactaatatcaggaaaccaatcataccagtgaatcagagcccagttttggggactgaaagactcagggtgaaattgctgtgactccttgggctagtctctgtagttctcagaaactcagtaatgtcatctgtaaaatggaataataatgcccaattcatgtgtttgtagtgaagattgaaggagatactacctgcaaagtattcagatgtttgcctggtctatggtaattgccgaataaatgttacctgttatcccagtgttgtgtgcattgatggcaatgataaacaacaatacttgaggaattttgaggtttgattcatcattcttttaccttctgaaatttggcatccttggaaaatggaaaaagaaacaaaatttgtatattccttttgttgcagaaatgggtaattatgtgatatacacatacatatgtgtgtacattttataccaaaaattatatagaaaatgtacacacatataaatacacatacaattatatgtggtatgtatgaatgtattatgtgtaagatatatattataaatatataatatagagtatgtctggcagtatattctgttttgtgttatacataatataacaaaatgtatgttattagattacatagatttctggtatctatgttacaatcttttctaattaaaaattttttaaaaagtatctaaagaaaaagcatcagctgccccctgcaagttctctgaggactggcttttattattatttgttttgacacttcagtggcagcaacttccagttacagccagagtctcagtatgtaatcccgtggaaacgtccctaggtaacaggatgtgcccactggtcatggaagtcagttctgttaaacagggaggattttatctgtctgaataaatatttctgcagctcttctcacgctatggatttgagatgtgaacaggcaagaagggtcatcactataaatcaatagtttccatgaagttgccaccgatttagagcagacagcagcttttgggttgaaataaagatcgtgaagtgcagacgtaggcagcaaatgctggggataatgtgtggagtgtataggactattcagtgaacgtctatcaaggatggatagaaaggagaatgctctttttgagataagttagctaatcgataattggcaagggaaacatggaaatacttggtggaaattgatgccacctacaccaatccacacaagtacatgcacctcaaacctaccacccaatatccaattgtcaccaagtctatctaatcacatcttactcacctttgtgctactcacaagttgccatggaggtgagagtagacgcggtggggatggacgatctctctcaggacaggatgatagaaaaggaagaaaagaagatttgttttaaggatgggccacttctatgaatggttggaagaatggaggagagaaggacagcaaaaggtgataggagaggtggcaggtgaaccagggagggacagtttcctaaagggtagaaggaatttcatggagacagcaacccgtggatggtgccaaatctcatcatgaattgacaagagtccttggacttaccttcctgggagtcggttttatagattttgcacaactttgtacctaaatcattcccaacaattaagtgtgagttcccagagggcaggtaccagggtttattcattttggaaaccccagggtctggcagacatattagggatgaataaatgtgttttgaaagtatgaatgaatgaatgaatggataaataagtgctggccttaacataacagtttaatgtctgtgcaaaatgaaaataacaaagtgttaaagaagtaattagaaattggcaaaatggggcacaagaaaccatcttacatatgtggtagctctaggggtttaagaaataacatccctttatttccctactgagtaagaaccaatggagaaagaagctgggcaggaaggcaaaaggaaataaacaatcttctttcatttagcctaatgtttttaaggttctgctcccatccccgtgaagtgttgggaataggcaagtctatagagatgcgaagtagattagtaattgcctagggatggagcgtggactgcaaatgtgcacgaggcttccctcccggggtaataaaaaaaaagttctaaaattaaattgtggtgataatggcaccactgtgtgaatatactgaaagctactgaatcgtgtaccctgaattagtgaattttatggtttatgaactctatctcaataaaactggttttctaaacaagaaaacaaaaaggtttccgcttattaaataaacccaaatttaaaggtatggccgaatgggcttgcttgtactctcctgatttgtgcagacttgtccatcagtcactgaaagtgtggaaatcttcagtccatcctctggcctccagtagacacagacacacacacacacacacacacacacacacacagacacacacacaaaggtacacagacacacacacagacacacacagataaacacacagacacacagacacacacagactctccctctcactctcgctctgtcgctctctctctcactcatgagtgctgtagctgagaaagaagcccagagtatgctttttctgccagctggagaatttgacctagggctaagtgactagcctgagtacatccaggttcttttcccaaaggaaccaatttgataaaccattccttcttagcatggaggaatgagaagctggggagaggcccagaatattatgctagaaaaattcttgcacatggaaacacagggaaggaggataagggggtgcctccattcttatgtctcatactttttatgtccagtagtgtctgcatttctatcataaatactcttttaaaatcaggagtcctagaccagagaatgttccctgcattccatatcaggtaagatccaagtatacaaagcctgtctctttaattaatttcctttcacccaaatcctatccattgggcatgatcaatagttataaaacccatcatttccagtgttatggtaatgcgaaagcttgatgaaatatgggtttgaccacacagtagtcagaagtctagttcttcatgtattaaaggataccattccagctgggcacggtggctcacacctgtaatcccagcactttgggaggcggagacaggcggatcacgaggtcaggagatcgagaccatcctggctaacacagtgaaaccccgtctctactaaaaaatacaaaaaattagccgggcgtggtggcgggcgcctgtagtcccagctactcaggaggctgaggcaggagaatggcgtgaatccgggaggcagagcttgccgtgagccaagatcatgccactgcactccagcctgggcgacagagctagactctgtctgaaaaaaaaacaaaacaaaacaaacaaacaaaaaagatatcattccatctattgtgtgtttatctctgtttagttacgcacttgtgtgtagttgcattgacatttaggcagacttgcctattctagacattttcttactatgaaatgcacgtgactagcacagtgtctggttattagtcaattctcattaaatattggctgcataagggatggggatcataggcattcggaatataggaggatcgactctattctggcattattggatgaaaggggttctttattggaaccgactacatttttttgtccttggtaatattagtcttactttgaggcactagggcattttgagactagtgaaactcccatggccttcagaattataatttaaatcttctattcctccagaactcaggacatttaatttatcatgattcataaaagaccagtaataaaccctgtctttatttaaacgtgggcggcattgacttcccgctgtaggaattgggtgttctttatcaacgtctctctatctacttatcacggatcctgcatgtgtacaaaaaggcatctttgtcagtcagggggagattttattaactaaaggttcatttgttcttcaagtgacactatctctttggaattaccagatgttgttcaaactgtgccggctctccttttattctgatgatggcaaatgttgaatgtggtgaataaatattgggcactgtcctcggtcatctcaaataaatgtgataaaatgaaaacatgtcgcctctgaggtctcatttgttcccaggaagtccacggcgcattaaggcccacagacaatgaaagacgaatcagccattcactgggtattccattatgagacattcttgtcattttccagattgaattttagattaatatatagcctgagataagatggcatgtattgagatgatgccacagtgccatggccaaattgttttgttataatcacatgatatagagaattaaatgtattgtgatgatctgccgtagaaatttgcatttaaaagaaaaagtggcagaaaataaattaatagtaaatttcttatgacttagacctgaagaggctcatgtgactgcaggtgttatgttttgacccttctttgctaccatggcaagactggtgactgtcttctgaggagaagtagaggagatttcacttaactggatgatcacagagttgaggtttttgtcatccattgctgagccatgtattaaatattcattatatatataaatatacacacatacgtatatatacatacatatatatacatatatatacatatatatacatatatacacatatatatacatatatatacatatatacatacatatatacatatatacatacatatacatatatacatacatatatacatatatacatacatatacatatatacatatatacacacatatatatacacatatatatatatacatatatataataaaaaagtgggaaagaacaatctggcaaaacagacattttggaatcaccatgcccttctttttcgggtgatgcatgacacccatgaattaagatttaaaagaggatataaagcagaatcttgctttcacagtggggagaagaacttatgaatgctttgaaaataattgctaagaattatactcaaatcgtattacatcaagaaatggagatgtgaaccagactgggacagtacgatttcacaataacagccacaatttctctaatttattacattgtcatctgtcttgtgatttaacatcctttttcacagtctgcagtaatatatggaattactaaaagttggcggctgtctgacgttcagaaatgttgaaagaaatgaagtatttctgtgggtgttgccgaagtcctgttgaaagggtagttaagtatcgctgattaattcccattctatctctgatgaaatggagaaggggaaaatgctcctttcgaccaagtatctcattgcaaactgcagcccagaagttgcataagcattttccttcttcggtataaattgatttgctgtgaaaaatttcagacggttccatgtcaaggcaatgttttatttcgtggtgcaggacaaatgtagagctaagtagatttgtaggctaatttattggtcattttaatattgtgtattctcccctttggtgtgttaagtacttccccaatgcttcttcagcgatatactgcttatggcatgcccaactcatcttaattaaattctttcttgccacaacctcatttttgctcatgggatacattgctgtcactgtgaaacattttctaggaaaattgagatctatttttcataaattaggctcttttttaaggctctctatgttagtcacttaaattaatattaagttattatgtactccaaatcagtgctttataagtctttcaaaaaatatcggttgcccagaagcctgggaggagtgcgatagagctggagcgtaacgtgcaggtgtgttgggttagtgatgggtgaaatgactctatgtggctcgtccccacctcccattgttagaggcaatcagagaaagcattttgcaaatcgagaataagaaagaggccttacagagcatgttgccgctgctgctgctgctcctggcacccctgctgagatcagctcagtgcagtcttctcttttagaaagaggagaagagtttatcctgaactgtgcattttttagttttagaaaacatggatttcctgacaggaaatgggaagctttttgaactgtatgacttgagtcatctgtcacgttggaaggacattggaaaaatcagcctcctgatgtagaactttgtcatgactttcaaaagtttccctacaaattgacacatggggcttttggcttttgtcctggggatatggcagttgtcatgtcaatgtctagaaaaattgtcccttataaccaaagatggctaattaaacaaaacaaaacgcccaaacaggtgcttattcattccctccgtccgtcccactctcacacaggtaaagaacgtgtttcagctaagatgattaacatgcttcccccacccccaccccctgacttaaatcctcaagcccactagctcttgccttaccgccatgctgacttttacttccccaaacatacccagctcctcctgagtgggacgttgtgagcattctgctccctctgtctggaatgtgcccctcctgcctcaccacaacctttgcagagttagcttttacttctcctttcactctctactcaaaaatgccgcttcctccaggaaagtctttcctggaattcccacccctaatgcaactccaactccctaggatagatgagaatatgtctgtatttggtctcatagttccttgtacttttcctccagtttatatatacatatgtgtgtgtgtgtgtgtgtgtgtatatacatatgtgtatatatatgactgtttgtgtgtacatatatatatacacaaacacacactcacatagtcacatgtcatgtcaatgtctagataagttgtgccttataaccaaaagtgtctaattagacaaaacacccaaacaggggtttattcattctctcagtctatttctctcacatatatttagaacatgtatatgtatgtgtgtatatgtgtgtatatatacacacacacgtatgtatacatatatagatatagatccacacacagctgctagtaccactgctgagatcatctcagcaccatcttctcttttagaaagaggagaagagtttatcctgaactatgcattttttgagaaaacatgaatttcatgttgaggaaatgggaagctttttgaactgtatgacttgagtcacctgtcgtgttggaaggacattggaaaataggacgtgtgggtgtatgtgtatatatatacatacatacatgtatacacacacacatatatgtgaatatatacccacacacacaaataagtacataggtatatatctgtgtatatatatccctctataatctgtgtgtgtctatatatctatatctctttatatccatatattgaacacctactatgtgccaggcgctcttcctgcatttggaacttgttggtgtaaagacgacaaactgaagttgttccctgaagctcccttatctgcctaaagtctggacccactaaaaaagaaaacaagaacctctggttccttccctgagttctcattaattgaactcatattgcaggaagaaagactgatgttttccaacccacatgaacagacttttgtcacaggccattgttcttcaagcccattgagttcccgtaaaaatcacttactacctatgctaaaatcatccacactttcccatttccctttcccctaagaagaaggatatataaccatctgtatcacattgtgcggtggggtaatcactctgttattctgccccatgcatggtaatcaattcgtttgccatttatcaaaaaaaaaaaaaaaaaaaagtcaagccctcatgaagtcaatattctagttggggggaaaaacaatgaaaagtgtgcgtgatgcctgagcaaattgtgttagaacatgagcagtgctatggaaaaaagaaaaccaaaacagaaaaggatgaggagggcaggagagtgggggtggaagaatccattgcaattttacatgaggaggagagggccagtgtgggccttactgtgaaggtgacattttggcataaagccagctgcatggatttggaagagcattccaggcagtgaaaacagtcaaagcaaaagatctaaggcttgagagtagccgtctgttcaagagacaatagaagggccagagggagtggagcggaaaatagcagggaatgagttgagggaagaagcaaggtgaggaggaggtgcaaaccacttaggacttgtaggcattcagggcctttggattttacttgagtaaaatagggtcttgacttacatttcaaatgaataatttgaacttctgcattgaaaattgattatgagggcgcttaatgcagtttatagctgtgtacttgtgtgattatgtggttgatgtctgtctctctcatagactgtaggccctaagagggctggagtactgtctgacttgctcttcatggaatctccaagatcaagcctagtgcttggcatgttgctgtccaataaatatttaatgtgaaaggataaaatgaatgcaggccacatcaagatgatgctagttggcattcatccctcagaggcatgtgctgtagatagtcaatgtgcaaatttcaacttgtatccatccacttaaagacaacttcaaacgcaccctccaaccacaggcttaagttgaattatctgcttaattgttgctatgtgcagctgtttttcattagtgctgttttaatttgcagtctatgaactttgatatttgtaacaaaaagtaattggatactagtctggaaggcttccctccttaaaatgaatatgcttcacgcccaagcaaatgactggaaaggttccctgctgtctactagggaaaagattcacgggggcaggggctgtccacagcagaccagaatgttacagtctgctgggtaaatgttccatggtttcagaattaatatgcatgcattccgtaatacatatttacctggtagtctgtaaccattcagtagaactgttacagtctagtaagtaaataacatgtttttcaaaattagaacgtgtaccaaatatgtatttacccaataggctgtaacagttctgaggaaaccttccctgttgttagtctatcaggctgacttatggatatgggtttaatgttgttttgaatatgaacacagtataaaggaagatgtgtgatttttagaagggcgaggggttgtcatgtagaacaaaccaattttaggaggaaaattcaattcagttgcagaatctgttcctgctattcttttcctttcttttattttatctttttgttttttcttttatgctagttgctggaagattgctaatgacaccaggatgaatttttaaatactgtaatttaattattggtaacataatatggctttataagtgattagtggacagatttctgaacatgtgtaggggccagttttttagttgctaacctcatggccttggaggaatccacaagttggattctggtgaatgatttaatgacggtattggcagcactttgcctaatgagtatgtatcactctggcctaggtaagtcaagctaaagctaaccacattcacatcatccacctagatctgttatacaggaacaaactgtgtagagatcattatgaggccatgttggtgctttaaggcatggagttttcagcgggatattactcatttccatcattactgatgttcagctgcatttctactgatgtcggctgcatgggtagagaattagactccatagttcaagatagttcatgggtaagtaacattgtagtcaagagtttgtggctctggaatcagatgacttgggtgccagccctctgaacttgtatcagtgatttaaccactttaagacctgattaccttatctgtacaattagagattgccttatctgcacactaattgtacagaacagtcattgtacagataaggcaacactagtattcactttataacattcttgtgagtgaaatagtatccataaactgtgtatcactcttcagagcacatattgaatatttaataggcatcatcaacttttgtctatgatcactgtggaaattcagctgtgctggcatacaggaggtatatgtagcaggattagcaagggtgactcagtccaggtttccaagtatttagtttggaagtaaatgaagacacgatgtgtgtaattggatatttcactaataggttataagtggttgtgcaagtttctaaacatcttgcatgtactaataaatacttttagttgacaaatgagaaagcagccatgaatctgagtctcttacttggaaccaggtgaaacagtgatttatgaaatgccctttaaaactccttggaggttcacattctgcacaagttgctttttttctttctaattgagaaagctgctatattttgagtctgtgtaagcaactgcaggccttgattcttgattcttttctttctttctttctttctttctttctttctttctttctttctttcttttttttttttttttttgcatagttgttactgtttccttgggcagagagccataggatgagtcccacagccctttcctgggtatgtccttctgtgcaatgtaccttccatgaagcttaccagcatgttttatcatgtgttcaatgtcatttgcacaattagactcagatgctgcaggggcagggggccatggagtatactcacttcttccaagtgctgtttccccaggcccaagtgcaatgcctggtgcaaaatgaatactcaggtggttcctgtgttgtcgtcctttgtgactctgtctctctgaattagttctagtccatggcactgcgtgacttccaagacaattttagcatcctgtgcaacacgcatgagatttagaagcattgtctgttgacattattctttatgaacatttactgagagcttacaatgggccaggcactattctaagcatttcacatcaatatttcataggaatccatttaagtccatcttattattaccctcatttatcagatgagaaactgggatcccccctagattggatgtgtataagttattgagatgtaagtcaaaaaatttggtgcatccctagagcccagagtcccttacatctactctaccttgtctcccaaggaaaatactatggtcaggagttgggtaagccgataaaaagatggctgggtgtggtggctcacgcctgtacttccagcactttgcgaggccaaggtaggcagattgtttgagctcaggggttcacgaccgttatcagcaacgtggcaaaagctcatctctacaaaaatacaaaaaaagtagccaagcatggtggcacacactggtagtagggcacacacatcagtagggcttgggaggtggaggttgcagtgagctgagactgagccactgcaatccagtctaggagacacagtgggatcctgtctccaaaaaaaaaatatatatatatgtgtgtgtgtgtgtgtatgtatgtatatgtatgtgtgtgtgtgtatatgtgcgtatatgtgtgtgtgtgtatatatatatatcccattaggtctgcctgccacagtggggatcattcttcaacatgagatttggaggggacagacatgtaaactacagcacccatgttgtttctgcttcttcccagcaagctatttctagccacccttcacctccaccaaccttaacctcacaatcacttctggatgttcttgtagcctacactgtggattgttctaggctctttaattttctgttttccacgaaagtctgtaagcttgatgaggataaaagccatgattgccttgcttaccctcactgtgaatgaatgaatggagtggtgcagaaactcaagagcatcatgtacatatggaacatgctctatggtttttaatgaaaatatgtggcagtattggctgggctgcagtgcatacagtggagtattattcagctataaaaagaaggaaatactgtgttcgtaaaaacatggtgtgaacccaggagacagagcttgcagtgagccgagatcgtgccactacactccagcctgggcaacagagtgagactctgtctcaaaaacaaacaaaaacaaacaaaaataaacaaacaaacacatgggtaaacctgggggacaccgtgctaagtgagataagccaggcacagaatgacaaataccgcatgatctcactgatatatggaatctaaaaagctgaactcttggaagcagagagtagaaaggtggttggcaaggtttgggggtgggggaaatggagagctgttggtcaaaacacacaaatttcagtaaaaagatgaacaggttctgaggatcttgttccccagtgtgggtggtgatggatgtgttaatttatttgattgcggtaatcattacacaaggcatatataaatcatcacattgtacaccttgaatctgttcagtccttatttaaaaattttttaaaattaaagcatttgcggctgggcacggtggctcatgtctgtaatcccagcactttgagaggctaaggtgggaggatcacttgaggtcaggagttggagatcagcttggccaacatggtgaaaccccatttgtactaaaaatacaaaaattagctggatgtgctggcatgcacttgtaatcctggggagactaaacaagaattgcttgaacccaggagacagaggttgtagtgagcagagattgcatcactgcactccagcctgggtggggagactctgtctccaaaaaaaaaaaaaaaaaagcatttgcaacagggaaggtaaactacagtgataacaaaatactactcattgtagaaaagacaaagtacaaatagccataggcccccaaatgtgaaatgactttttcttttcttttctttttttttgtctgagacagagtctcactctgttgcccaggctggagctcagtggcgcgatcttggctcactgcaacctccatctcccagattcaagctgattctcctgcctcagcctcccaagtagctggaactacaggcgcccgccaccatgcctggctaattttttgtatttttagtagagatggggtttcaccatgttagccaggatggtctcgatctcctgacctcgtgatccacctgcttcggcttcccaaagtgctcggattacaggtgtgagtcactgcgcccagctcccagattcaagccgattctcctgcctcagcctcccaagtagctggaactacaggagcctgctaccacgcctggctatttttttgtatttttagtagagacgggggtttcaccatgttagccaggatggtctcgatctcctgacctcgtgatccgcccgctttggctttccaaagtgctgggattacaggtgtgagtcactgcacccagctcactttttctttaatttttgctataagctcacctgatgaaaaaaagagctggaaggattagcagctatgtgaggctatcaatcagggtaagacaggctatgctgtagtaacacataacccccaatatccatggcttaaaagaaccaatgtgctttgtttttgtttttgtttttttcctcacatatttctctctgttcatcctgcactggctgggagtgctactctatttgttcttcatgcagggtcacaggttacacctcttctgcgattaccaggacagagaacaaacagagttaattgcacactgttccttcaaggtgttatcccaaagtaatgtgtgtcatcactgttcaaatttattagctaaaacaagacattcagctatgcctaagtccaagtaggcaaggaggtacaatcacctccgttgttttgaaggagaaacataattttttggtgaaaagcaactgagatccaccacggtgagaaaaagccacaggccagtctcacagcatcatggcgaacagctatgcctaattgcacctcgattctaggtgtgatcctgtcaaaagcagtacctttaagatgtgtagttatagtattgtcattctaaaatatgtaacttttaggaattttgtggctagacgtagggacctccatttgattttttttttcttctcttcttagtgagcctagtttgaaatgttggctttcttaatctacagagactttgtcattaatgtgtaatgaatatctggtttcaaaccataggctgcttatcccttgactatttgtcgagacctttgtttgccgaaatactgctttatttcatttcttattatctttagaaggtattactgataggtattcattttgacccctttacgcacactcctcaagtctgtcttctccacaggctaaatcagtattccatccacttttcatctttactgttcctggcactctcatctatatgagaaacaggatctgtgtttgacaagcatgcttaccctttgcttactgttttaataaaaatttctatcagcgtttttatctgcagtagcagtcgagacactgtttgatattgagatgctagatttcatggactttgaaatattttccccatatcttttttggcaagtctttgaacatagaccacaaaaaattgacatgttggagatgaatttacagactctaagttaactaatgactacctgtcccagcttaaattgtgttctaggattgaaacattatattacacagtcaaatcgttgaaattaatggtcagactcttccataactgagttagtttcccatgagactgatactctattaaatgagcaggctgtccagatttctctgcatcgcctttggtttggggataatgttgacccagtcttggcagtttcaaagcagtaccaagcagtcagactattttaaatggggaatgatgaatagcagcttcctaatctccaaatttcattcagatacggtatcttatttcatcccctttatcctgtgaggcaaattattattgtcctgaacacagagagatggggaaactgaggcatggatgttactctgtgtgctgaagattatacaactactgagtagctcaggttcgtttggtctttctgtccctagatagcctcttggctggcagttctcatgattcaggactcttctcaaatatctctcatgagagaggcctttcttggctgctccagccacagagacagtcaccctggttctctgctctgtcaccttcatagcacttattactatttcattgtgtttcttatgtgtctgcttgttctcagtctctgtccacttgagaacaaaggaaaggaccttgtctctttcatttcagcgccacatcccagcactacaccagtgcctggcacccagtagatattctgaaatgtcagtggatggatgcctatttacatactgtgcttttcttgtccctcagggccacatttttgagttggtccatacaaagcaacaaattaagcatttagggctttatggacaaaccccactatttttttaaaattttttaaaattcctttttagagacagggtctcactctgtcacccaggctggagtgagtggtgagattacagtttgctggagccttgaactgccaggctcaagcaatcttcccacctcagcctcccgagtagctgggactacaggcgcatgccaccatgccaggctaattatttaaattctttgtagaggtagggtctgactatgttgaacaggctggccttgaacttctggcctgaagtggtccactatttaaggtctttgacagtgcagctttacgggtaatgacatgtattagttatctaataccatgtaacaaattactcccaaagttagcctctcaaaacaacaaaagtttctttttcatctcatagagtttctgaggtccaggaatctgggagtggctctagctctagtttccttgtgaggtggtggttcagtacatcagctggggcagccgtcagtgacagttggaagtactgcttctagactcactcatatggatattggcaggcctcagttcttcaccacatgggcctctttacaggctgctggagtgtcctggagacatggcggatggctctctaccaaattgagttatgagacagagaaagcggggagagaaaagggagaaagaagggagagatgctaagatggaagccatagtcttttataacccaacctcagagtgacataccatcacttctgccatgttccattggaactcttgtacagtgtgggaggagatggcacaaaggcacgaataacagaagatggggattatctcagggccatcttgggggttcattctcatgtatcttattctgattctcagaagagagccctggatagaacatgtaactctgtataacagtaaatcatttcctaatgtcttcttccatttcaggggccagttgggtggaaagtttgattaccagtgtgcttataactcttttttttattattttttgagattgagtcttctctgacacccaggctggagtgcagtggcgcgatctcggctcactgcaacctccgcctcctgggtttaagcgattatcctgcctcagcactgcccccaagtagctgggagtacaggcacgtgccattatgcccacgtgatttttccatttttagtacagatgggatttcaccacattggccaggctggtctcaaactcccaaccttaaatgatctgcctacctcagcctcccacaatactgggattagagatagctcttggataatatgctacttaagaatacagattctggtgtcagcagcccagctttgaatactctctctgcctcttgatatccatgtaaactgaggatattttgaagcttttcttcttacagaattgtggaagcaatgtataagttatctaatactctgtattagttatctaatactgtgtaagaaattactcccaaagttagcctctcaaaacaacaaacatttctttttgttgaatgagttttcatctcattgctgtagaataggatcctagtagtatctacctcatggagttgtgaggattcagtaagttacttcatgtgatgctcataccagaatgtttgccagactaagggcacttaggaagtgttgacttttattctttggattatcccacagctaatcagtgccaaagtaattgttgcttcccatagcttatccttcactagatggaagtgtcctagacagacctctgagacgaagtcagtctaaacaacttctggcaagctatgagctgtaattgggttaaatagttgcgacgtggagaaatctacttttctgttgcagaagtttcatgggctctgtcaacctttctgtccatgggtggttttctgtgggaacccatcctgtgagtaccttgacaataacagcttacctaccatccagaatttagtattctcccttcattctctagagaaaacccaagcataccttcctgagtggttggccagtggctgaattccacggctgtttcgttaagttctctttaagcagatttttcaagtcttccctatttatatcttttgaaatccaatctccttcaatcaattttaatcccctaatgtgtttgctataagtactgtacaattcacttgtcctcaataataaaattcattttggtgcagcctgccggtaatttgtttgagaagaagtcgttaggaaacccttgcattctcttctggtttagaggacgaccttcagtattgatagcattttgttgtcatgcgcttgaagtattctttcatgattgacagtgccgtttaaataatggactacagagccatgtgcttaaatgaaatctgactacactaatttcgttatatattaggaaacttcaagtgttctacaaggacacgatttcattgaccatggatttatattttcagtttgtatgaattatacccattgtgtattgttcccccttcactgtaagatactcttttgttttgaaaatcagtgtttttgtgttttaactctcaatgtatgctgcataagcaaaggattgtgttccaggcccctcctggaacaggccaaagtaagtaaaatcgagaattttttatatgaaagatagaagaagtacagcattattgactcagcttaatactgagttaatacactctaataaggctcagaagatataaaagatccactgtactctctctatatatatatatacacacatacatacacatataaaatataatttatacatgtatgcttaattggaaaaaataaagatcaagagcatgttttattgtttatctgtatctctagctttttttaacagcatataaagacaaagcacctttttatttaggcttggctaaaaattatcagtcatatgtagatgattttgcagtatccgccaacttcctactcaggaaaagttatagcagatggcagaatttatgtgccatgtggcatttgtttaagtgtggaaatagctaatattttttcctcaattattataactattttacttttaaagactcaattaactttgaaataccattcttgatgggtgcctcagttaaggatgggatggggagaaggaagagaaatttgaaatcttgcagggcctttgattgaataacggttatattgctcattaatcagaggctctgggtaccctgttttcaaaataacattattgtttactaaatatagactcctgtggaactgttaaggagaaggtcctactgagatgagcaggcattgtggattggcctttctactaccaaggactgggattcacatttgcaagtttgtgggtcctcagggagaatatcttggagttgacatcatttcaggcatatagcccgtaatttgttttgacaactacaaacaaaaggggtctattcccaaaaggcttcttcgaaaattgtcagaggctcttgccgttgataatgtgagctgctgctcccagggctgagggcctgagaaccacagcaggactggaatccagtgggaggagcaaggaagctgcagggggtgacggtgggcatccttccagagagaagggcacatttgaaacctaggagaccattcctgtcaggaatcaatatcaggtgactgtgatctatggcagagacccagtgctcggagtgatttttttaagttgtgtatgcttcatatagattttctttcctgatttgagtttttctacttgggtgaaataaaaggcaaggggtttgtgtgctggggtagtcggggagagaggagaggatttgatggagaacatcaaggacctgttgcttgcctgttttctaggaatccttacctgtaatcagctcattacagagaatcttggggttctcttgagcctgctgaaggcatgcctcctgagatccattgaatagagcaaaaggatcagtcaggaaatatttattacacagaggaaagaagaatgcaccagcagagttctgggcctgctgcagccactcagtaaatattttttgagtgaattaatttatcaaaaaagcatatgtaaaaatatgagtcattatcatgagtggtttgattgaggatgatatttcttttcttagtttttacaactgttggtaacatttgattaattacttttattacaattatgattatcatcattttatatacagttgtactccttgcctgtgttaacaatttggtgatagcctttcacatttttatacctttacatggcctgtataagtatacagttttgtcctaatatacatgaaataataaaaagtggatttttctgccaatacacacttagcaagcgttccagggtctctttatgtattagaacataatctcattgtcatctcattctttttaaaacgttacttgatatcccgtcgtggaagtataatatttatttaaatatgttttgcctatatttgatttcataatgtatatttttaagtgacaaatctgtatcaaattctataggacatagagaataaacccatgactcttccaagttgtctgagatctagttatgaattttgcacattttcttaatgagtatgttctgcttttaaaacattaaaggttgaagaacgttttaaatctacttacaggatcaaaactatgcacatgaaaagaatgtctaacctttgttgggctcttatctaagagacactaagcgtgcatgtacaaatatatataaactcattaaaatcccttccattatttagcgtgaaccgtagcatagccaggcaagattgctgagtcttccccagatggac[133 bp omitted]ctcttgcctcagcctcccgagtagctagaattacaggtgtgagatatgcacccagctaattttttgtgtcttttagtagaaacggggtttcaccatgttggccacgctggcctcgaactcctgacctcaagtgatccacccaccttcgcctcccaaagtgttgggatttcaggagtgatcccgcatgcccagccatcaataaatacttactaagtgcctactttgttcccaagagtgctgggaacttagcagtgaacaaaataaataccttccctcggggaccttgaactcaagtctagtcagggatcactctattaagagatcaagtcaacactcaattctcctacagactcagataggatagtattttaatttctcgttgatctgctccctcagaccctagaccatgggcactgcagatttttgcaccttttgtagaggcagggtttcaccactaccagagactttaccatcatttctatgtgaagggaaacagtgccctttcagtagacaacgttaaatcagccatcagacgtgggtcatggtgggtttgccgtgactgccacaaacacgcctcaccgaagtctgccaggggacgccataccctcccctagaaagtaagaaacagagaaaggctttctcctgccccggactgtctttctctcagctctaagaaatttctttacagctgttactttatcctggcctgtctcttgagtaagaaaactgctggaaagagtctgccattcactcagatcataatcagggagcctgctgtcactcaggaagggctttaaaaaattcttctgatttactgtgagtgcaaatctctgatattcctgcatctccccatccatcttattttgattttacacatagtgcgattttgaaaggaagcggtgtttttggagaggtagaaaaactctggaaaataaggcttatgacgttggccatcagcacggggctgctgtctgctgtgtgacatgctcaggggtgacgcgcctcccgaaagagacacttggtagagaaggcacgggcgcgaagcccggctgcgggagagctgggagcctgaatgtcgctggctgccgttcacagcaggctctctctgagcaccgtggggaggcagtgacacccgctggcctcgcagcgacactccggcagctgtcctgttttccagcctggacgtgataggtgtgtcttggaggacagtcagaggaagacaggcaagccatactggcctccctcgaggttataccctcgcttaggttaggttgcttctaacagacatcctccgcgggcgttgaggcagccagcttcactgtcacccagacaatttttctctcgctctgccaaccctgttcccctttcaagaatgtttaaactcttcattcaagcgatgagagggaaacacttgagctgcacactcaaggagatgtgggtttccattctggccttgcgatatattattggtgggaccgtgggtgagtcacttaacttctctagtcctcagttttcttatctgtaaagtgggctccagcatacggcttaactgaggtaacacacgttgttcatgtcagctgttgctttcatgccggctctgcctaggtctccccatggcaacaggataggagttctctgcctgtgcgtcagtttttcactagcgtgggaatgctgtgaggagggggcggaactcggtgtagcaagggtttctgtccgtatcttctattttttttttttttttttttttgagactgagtcttgctctgtcgctcaggctggagtgcagtggcgcgatctccgctcactgcaagctccgcttccagggttcacgccattctcctgcctcagcctcccaagtagctgggactacaggcgcccgccaccaagcccagctaattttttgtatttttagtagagacggggtttcaccgttttagccgggatggtctcgatctcctgacctcgtgatccgcccgcctcggcctcccaaagtgctgggattacaggcgtgactaccgcgcccggcccgtatcttctattaagaaccagcaaccacgggctgggcgtggtggctcacgcctgtaatcccagcacttagggaggccaaagtgggcggatcacgaggtcaggcgatccagaccatcctggataacacggtgaaaccccgtctctactaaaaatacaaaaaatttggcaggcgtggtggcgggcgcctgtagtcccagctactcgggaggctgagggaggagaatggcgtgaacctgggaggcggagcttgcagtgagccgagatggcaccactgcactccagcttgggggacagagcgagactccgtctcaattaaaaaaaaaaaaaaaaaaaaacagcatccaggaatgctatcgtgtagttgctttgagacatggcctggggtctccccgcaaggcgacaggacagattacgacacgttgtttgaaatctgcctttagaaaaagacacggcctcattttatgcctgtgagtgatttttcttctgtgtcatatcataactctgataaagataattacatcctagtgtctaaaggcaatgatgtgcttgattaagcctatgcatgttgtttggtccttgtatatttatattttcttcaaatttaaatggatactaagtcctctcaacattgtctatagattgctggaaactgtgactttaagcaaaatgacgtgtaacagaataccttttaccatgagctgattgatacaaacaagagttaagttcctgcagcacatttctggtcataaaagcatcactgatcttctaaataaagacccaaaacacttctaaaattaaacatgaaaacacatgtgaaccatacatacattttaaaaagattaataaagggctaggcacggtggctcatgcctgtaatcccagcactttgggaggccacggtgggcagatcacctgaggtcaggaatttgagaccagactgatcaatgtggtgaaacactgtctgtactaaaagtacagaaattaactggtgtggtagcagacgcctgtaatcccaggtactcgggaggctgaggcaggagaatcgcttgaacccaggaggtggaggttgtagttagccaagatcacagcactgcactctagtctgggtgacagagtgagactccatctcaataaaaaataaataaataaataaataaataaataaataaagattaataaaaacatgcaagataatttagccagtttttgattaatcagtgatggtggtggtaggcatggtgcgttacatcaaaaaataattttttatttttgcaaagcaaaaactgtcaggagcacctccccccatcacacagttcaaaaacaatgactagcatggcaggctcactgggcaccttcataccgcattgtttattgttgtgcacttttatgattagcatctactttatcagtttttatttggcagtcgtgagtattcattctttcattttgcaacctgcttattccagttcaggctttcgagtgggtggagcctgtcgtagcatctcagggcacaaggcagggaccactctggtcaggatgtgctgacacacacactcactcatgctgagacgacgtagacatgccatttccccaaacacgcacatctttgggatgtgggaggaaaccggagtacccggagaaaacctacgcagacatggggagaagatgccaactccacatagtggacccagttgggaatcagatttttttcttatcaacattgtaacataatattattcgaagacctgctgtactctgaactgttcattcttctaagggtcttaaaaacttgaggacattgaaatgctatggctcaccctcctattttctttcttaggtatgtttttactgagtcctctgaaccttctttgaactccaactgggaggaaataacagctaatggggggttgttcctatttttgttggcagggtgagggaggtggtgactgaggtcaaactatgtggaaggatattttatttactaaaacaaaagaggcaataattttttactgcaacgttagggatttatgctagataaaaggaagttcccacaatcctgggggaagggtgttaagccaaggcaaagatttcacagctgttgggaaattgctttctgaaaatactaaaggatacagtgccagagtcactggccatctgctaataatttatgttcctcatccccagcaaagataaagaacctgtaaagaaccacccatctagggatacatttccagccccccttttatcaaagcggtgacatgtgaccgaattctgcccagtgacatgtgggaagaagtggctctttcaggactgttcccccaaaactgtctttgggatgctccaaacttctttattcccccaatcctctgatgaacatgcacctgacattggatgctacatgttaaaaacggagttgtcatcttctacctgggtcgctgaatgactgtgtggatcaggaagctccccactcttccctgccatgactgaactagccactgtcatctggagggtgtctgtaatagcatctagcattgcctaacatcatactaatggaacactacatattttcatctgaagtgatatcagtggaatttccactgaaagcaaaggtttagattttggagcaataatgcttaatatttgtcagtaggagcttattaaatataaataccagtcccagtgcttagaactttttatgtgctgtctcctttcattttccttccaactctccagtttgtatcagtcggggaacaccaagttgtgctgtggtgacaaatagctctgaaatctcagtgatataacacaacaaaggtttatttcttgctgatgaagattcactgaggttctgggacactctacagagaagctcttctgcatgtattggctcatcattcccagtggttttactcttaggaacccaccatgtcaataagtagttccacatggtcccaggggaagtccacctggatgtctcacagtggtagtcaagtgctttgacaaggaagtgacacaccctactatcaccaaatcccattggccagaaccagtcacatggcctccttttccctcctgtatccctactatgtgctcaggaaaaaaataaaccagatagtgaagcaggaaggactatatggaaggatattttatttattaaacaaacgaggcaatcattttttactgcaatgtcatacaaatgagaaggctgggattcagagagcttcagtcactaggacaaggttacccagttaggaaagcacaggttttgtgatgaagggtgtcacccaacagtgcttatttcattgaagagccatttctaaaattacttttctgtgttacaacaaaaaataaggtaataagttagtcctcaagcatcttgcagttcagagctggaaacagacaagtaaaacgaccagttacctgcattctaactactactagacatcagatagcactttacatatcattacctcatatcttacgtagtgataagggaatgtgagaaaacttttgcaagtcatcacaaaacacttttttcaggggcataagaatcttggcctaaaatggatcatcatgtaacaggctgagaacagggtagtgggaagttagcgaagcaatgtccccgggacacagcagtgggtgaaagtgtgttgtgattcatgaccttatggatggacggtgttctcatccatctgtccttggctgggtagctgatggaacagtgatctgcttctctgggtatttgggagaaataaataaaaatccatggtaaaatgaagctgtgttctgcattttactcagcacaagcattctgtcctaaactccaaacattgtgcccaatggggatgtcggctatgggtattggtgtgtgtgcgtgtgtgtgtgtgtgagcatgggagaaacagagggacataggaagagacaaaaatatagagaaggagagagaaccccagagagagagaaacagagagtgaagaagaaacagaatattttccatttatttcaagtcagttatcccaagttttagtgggatcaaagtaaaatagataaaaatgtatttattaaatataatatagatttttttaagtatatttcctggttgctaaaaaataatctttgctcgaggcataagaatgatacaatggactttggggacttgggggaaagggtgggagtggggtgagggtaaaagactgcaaattgggtacagtgtacaaattacggctctggtgatgggtgtaccaaactgtcggaaatcaccactaaagcacttatttatgtaaccaaacaccacctgttttcccaaaacctatgaaaatataaaaataacaaataatttttgaaaatatttgctcaaaaatgaggctactgaaatgatgttatgttttcttctattttggttctacctagagaaattttaatgttttatgccaagctgttcatgcttagttctgtttttgttttgttttcttttttgttattgttgtttttgtttttgagaaaaggtcttattctgttacccaggctggagtgtagtggttcagttatcgctctctgtaggcttgatctactgggctcaagcagtcctcccacctcggtctcttgagtagctgggactatatgcatgcaccaccacacctggtgatatggtttggctttgtgtctccacccaaatctcatcttgaattgtagttcccataatccccatgtgtcatgggagggacctggtggaaggtaattgaatcatgggaatggttacttccatgctgttcttgggatagggagcgagttctcacaaaacctaatggttttgtaacgggcttttcctcctttgctctgcacttttccttgctgctgccatgtgaagaaaagcctgtttgcttccccttccgccacgattagaagtgttctgaggcttcccaagccatgctgaactgtgagtcagttatacctctttcctttataaacactaagtctcaggtatatctttagtagcagcgtgggaacagactaatacacttggctaatttttcaatttttttgtagagacacggtctcactatgttgcccagggtggtctcaaactcctggtctcaagctgtcctcccatatcagcctcctaaagtgctaggattataggtgtgagccactgccgccagccttcagtcctttttaaagtggtatacatattctatgtataggttcatggacctgttcatcttttttttgttgttttttcttttttcttttctgagacagagtcttgctctgtcgcccaggctggagtgcagcggtgtgatctcagatcactgcaacttctgcctcccgggttcaagtgattcttctgcctcagcctcccaggtagctgggattacaggtgcccaccaccgcacctagctaacttttgtgtttttagaagagacagggtttcaccatgtcagccaggctggtctcgaactcctgacctcataatctgccctcctcagcctcccaaagtgctgggattacaggcatgagccaccatgcccggccaggcctgttcatcttttaagggtttatgttgtttgactttttccatcacaaatttttattcacctcagtttgctgataactatttccaggtaagctggagtcataacacacatttgccaattatctggagaggagcactacttcctaattatgtggtcattgaagagctagttgatcattaagctacactgatatgcaaagccacaataataaacagcaggcaagattaaaaactccgtaagacataatcccttatggtcctcttcataaacatacaaataatgaaaaaataaatacacgtttgctcaattctgcaaaaccagaaatgtcacagggggggatgcataatagtgattgtattgagggaccaaccttggttgattcttttgtggggtatacacagtaaactcagacataaacctgcaaggtaggcatcattattctccttacctttctagagatgagaccagctgaggctcagagaagtaagttccctggccccacaaagctaatgaagccctggagtttagattcagacacagattctgttatccccaaagactaagaccctcaaaacatgtcaagtgttaaccgatgcctaaatggaactcaatttttccagaaagaccctgcatatctcatttgggcttgcttttttttttttttttgccctttttttcccccaaaatcataattgcaaaggcaagcttctgaagcattgatcaagaatatattttgctttggatgaagaatgtgaaaaatgtgattttagaagaatgctgtaaatatttctcccacttcattttcttttcccttctcctttttccatgctgtgccttttgagttatccccatatactctaagtgccaggtaggtccacgtgggacaaccagagtctaatgagttcctgcgccacgcccacccctaatgaagcatcttcaagtaggatttctaaagacccagggaagctttccctttggtgatttgcaaagtctggccactttagaatttatctcctgcacagggttctgtgtctttgctttttcgatgatccctgtgaagcatgaacccagcacccttgccttcctctttgttggagatggtggttatttgtttgagtcttttagggtgctttattttgttggtttcactgttggcagctggtacaggcttccttcccccagctgtgttggctgttgttttgggaaacaagccttgctcttttccatgcagacctctaccctgggctctgatggtctagctgaggtgaagcaaaccgtaggtgagtgccaacaggggatggccccttcctgggcagaaggcggatatcgatctcatgtcagtcatgttgcctgtctatgaaaatactacatgagcttctcagaaacaggtgatctattgatccccaagctgctaagggggcctccctcatgggttctgcttagctccttaatgagggactcacagctgtgtttatggaggtcacctggaactagaggcaggttttactgggaactctcaaactttgtgaaaattggatgtgtgtcccagattcttagctttggtgttatatccctcaaaggatgccactgagattacatgtccaacacaatcagaggcatttcaacatgtcaaggttttcttttgccctaggcattcatataaaccaatcgttatgaaaccggggcatttttgcttcccaaaggatattgataatctttggttgttgcagttgaagggatgctaccagcatctagtgggaaaagccaggggtgctgtactgctgcacatctaacaaggcaaagaccagctccccacccaacaaagaattattgggttcaaaatggcaatagcattgaggctgagaaagctgatttaagtcatattaaaatggaccccttgtaaatataaaacacaattttgtgatagtaaaaatttccaaagaatttttatcactttcctattgaagtgaattaactcttaatagctcattgaatttatgattagctattatttctcagtaatcatcgcataaacttgaaaattctgatgagaaaaataatgtacaacttattttccaacatgataaaatatttatgaacactaaatttaacaattaatgatgctgacataatgttgcattttggagaaatataattaagcagttattaattttgtctttgttccttgaaatgttagcgccaatttttttttttttcaatttttagatgcccttggacctcaaaggccctgacactgcatgtggagtcaggtgcataaaacatccttgaatctattaattctgggcctcctcaatgaaaggttaaattcatttaaaatacttaaatgatgacatcgtagatccaagaggtcaaataaaataaggatttagtctttttttctctcctttctttttccctccaccatttctctcttctcacttcttcatttctcatcttcttcctctcctgaccgctccttcctccctttctcttctttcctcccctttctttccttcctctttcccttccctcccctttcctagcttcccctcccctcctcacccctttttgaaatgttggagttcatttcaacagaaacaactgagctacagttccagctggttttctaagctacagttcaattattactattatttgcaatttttctcccctcccctcccctcctcttttctcctttccttgaatctattaattctggacctccctcttcctcactcttctctcctctcctctcttgtctcttgctcgatgtctctctctctctcacccttctctttggtgttcactccattctcaggtaaattctccccacaaggaagaggatggatagtatcagagccagcattctccactcagaaagccagctggaagatagagatctcatttcttggttgcttcagcaaaaggcccaggagtagttctaatgggtcctagcataaataaatcactgtggtccggggcacatggcactcattggccagcttggaacacatgtgcaacttcaggaccaggaactacctttccctgagacacttggtctgacagtgggaaatgggtgggttgcgtgcagagcaatgggcctgctgatgccaaacaagaggaatgataccagccaatcaacaaatgtctgctccttaaacaactgcaatgttaagttttgggggagcatctcacactagccctgtggatgaacagtgcttagtcaatggaggaaataactagaactttattagcttccattttacattttattcctttcttccaagtaattgggattggggagagcatcttgttacctgtcgcctttttaactggattctatccattctctgtaactcttagttctttgctctctggctggttttgtcaaggtaactaggtattttaaatcacagtgcaatttcttgtggctcagaaaactgaactgaagtagtaacttttaataggtcaattacattatttttcagcagcctgctgcagcctaatgaaactgcagtttaattaggttggtgtgacgccaaaataaatgtttcattcccagcttgttttatttactcattgaaaagtaggggaatctacaaataataggattggaaaatgttaaaggctaatcagtttggctgcacttgtttgtaaagaaagacgattgtatcttcatcactccagtttggtagttgagaaagctgaaaaacaaataaacaataacaacgacaacaacatttaaaaaaaaaaaagaaactcaaaattgtaggattccttagtagaaggttcttttaacaataataaagtcaactgcaaatactgaaagaccattcagaaagaaacgtaaccaagtcagagtctcctaatgtattctgtgttcctattgtgtggtaagcattgtccctgctgtaattacatctattttctcagtaaaacaaagggaagtcttgtagatgaagttttagggcccatcaaaggtagtactctgagtgtgatcaaaccacactttcactatttggagctcagtgagttaggaactagaagagcagagaacagcagaaaagttgtgttttattttcattattattattattattattattattattattattattattattgagacatggtcttgctctttcacccaggctagagtgcagtggcatgatcttagcacactccaacctctgcctcctgggttccagcaattctcttgccttagcctcccaagttgctgggattactgcccttccccaccacacccagctaattttttgtaatattagcagagatagggttttgccatgttgaccaggctggtctcaaactcctcacctcaaatgatccacctgccttggcctcccaaagtgctgggattacaggcatgagccaccatgcccggcctgtgttttcttttaaaatacagcacccctgaatgacctctagctactcccagtccttccaccctcagctggaagatgtgaattgccacccaccaaggcaggaccagcctggcaccgatcactgaaggattgtgattaagtcagatggttttgccagcagcctccagccgatgtctcatgctgagctattgtttcaacaaaaaatgagatgtctggtcatgttctctcttcctggggcagagattggggacctgcgttgaaaaccagtgacaacttccctttgccttactgaagataaaggggaatcaggcaaaaggatgctcaaccaaagctgcaggcaagcggattcccaggcagaacctggtcaaggctttgtaggcatcacttcttctctgagacacagagagcttggcatctctgtgcactttcataatacacaatggttagcattttaatctctggcagcctcatgcaaagaaaaaaattattccaaggcagtgccaggaatcctaatgtcctccatggtatttttccaaaacaattccttaatagataactatcatctttcctatcttacagaagaggaaacctttatcgtcatgtaggtgtgaaacaagaggtacatttgcagggctgccatgaagcattgtcattacacacatttatggtgtgaggaagtgctgttatagtctccaaaactttgaaatcatctcttcttgacttttacttcgactcttttttcaattttaattctaaggttgacttgtattctcggtcccctttgaatagaaccttagatcccccatgtcacattcaaaagacatgtttcaagtgccgtttttcatcttgacatgttttgcaaggtccttgcctctgtgactttgagatctgtttaattcactgcggtgggctgggtaggactcttccagtcttgtgatagtgctgtgttgctggttagatcaatgacatagactctttctgtttaagaataatgcagtaagcaatggtgaatgcttggaatgataactgtaatcatgcacctgttcactgcagttcaaagggggcaaaaacaggtgtacctttgctggtcatcacagcaaaactaatttagtttttttcttctttctttctctcctctttgacaatttgtgtaggggtctgtgcattaaaatggataattttaaggaaattctgtaaaataggtatgcatgagtattgtagaagtatcatgtagtagagatcatacgcaattatttctgtattaattaaagtgtgtccagatacctttaaacaacagttttaaacgttcaaaacagtggaatacatgttgcccaataagtgaaataatatatactgcaatgtatagaacaggtactagctgtatttaatagtgaagttatgcttaatttgaaatgcttcacatttgtttataaatccatcatcagaagcaatgtttgttatgatcaattcagacgtttggaatcaggaggtccagaaggcagccgtaggcagttgtttgtgcattcagactacagagtatcaagaaaatcccaatttgctcagataggtaggtgtgaaaaccaacaatttctttgaaccactcgtcttacaacctcagtgtattctatattgtgcatagatgacagaagaaacattcattcctaagatacctacaaaatgagcaaaaccagcagcataaatggacccagtagtaatctatctccagtgcgtcttaattttgtgcatcatccatttgtgactttcttttgttctttctgttaatcagagatcttttcagtggcaggtgacatatgcccaacttgaatggccttaaggaaaaaaacagtattgtctcatgtgattgaaacatctatgtatatatagctggtttggggcaaagctgaatcaagatgatcagatgatgttgccaggaatacttcttcccacattacacactcttctgtatgccatgtattttcaggctgttcccttaaagtggcaagatggcttccagcagggatacgcttacatcatcccagctcaggagcctgacggcaaagagaaccttctcttcagtggttcaggataagtcccggccagatctcagttgcttacccatcctaagaagcagggttttgttttaactgcactatcaccacgtaattataggagaaagggaaaaggtttcttcaatgagtctttaaaatatttaacattaaaaaattgacactaaaaattgtatattatgtaaaacaggatgttttgaaatatatatatattgtggaatgcttaaattgggtttaaatgagttaaattaatacatgcattacttcccctgtttattgtgtgtgtgtgtgtgtgttgagaacacttaaaatctattcctttagcaatttcctagtatacagtacctaattattaactgtagtcaccatgatgtacaacaggtctgttggatttattcctcttatctaactgaattttttttatccattgactaatgtctccccagctcccctctctccgcactggtaaccaccattctgttctctgcatttatgggttcacttctttaagattccacatacaaatgagataatacagtatttttctgagtttggcctttttttttgagacaaagtctcactctgtcacccaggctatagtgccgtggtgccatcctagctcacagcaaacttcgcctcccaggatcaagcaattctcctgcctcagcctcctgagtagctgggattacaggtgcacaccaccatgcctggctaatttttgtatttttagcagagacagggtttcaccttgttggccagggtggtcttgaactcctgacctaaagtgatccacctgcctcggcctctgaaattgctgggattacagacatgagccaccacgctcagctgtgtgcttggcttcctttaaggcatcttaatgctagaagaagctagaccatgacagacaagtaaaaaagaatgaaaatctactagggtagaggtttttagtgtaaaaaacagagagatgatttttcaaagaaagaactctcctcaaccctctttttacatacaaacttgtagaaaaattaaaacacacagtgaaaacccatataacttttgtgtagtttcaccaatgattaacattttgtgacatttactttctctttctaccctccgtcttcccatatatattggacaatttgaaaattacaggcaccatgaacaactcatgcctaaaggcttcaacatgcttctcttaaaaacaaggcggtttttgcctggcacagtggctcacgcctgtaatcccagcactttgggaggccgaggagaatggatcacctgaggtcaggagtttgagaccagcctggccaacatggtgaaaccgctgtctctactaaaaatacaaaaattagctgggcgtggtggcacacacctgtaatcccagctactcgggaggctgaggcaggagaattgcttgaacctgggaggcagaggttgcagtgagctgagattgtgccactgtactccagcctgggcacagagcaagactgtgtctcgggaaaaaaaaaaagaaaggcagttttgctatacagccacaaaacaattcttatttttttaatgtagatactaactggaacatgcatcgcacttagttgtccttatttctttcacagcttttgatctagaagagtactctcggctgggtgcgatggctcacgcctgtaatcccagcaatttgggaggccaaggcaggtggatcgtctgaggtcaggagttcgggaccagcctggccaacatgacaaaacctcgcatacaccaaacatacaaaaattagccaggtgtggtggtgcacacccgtaactcagctactctggaggctgaggctggagaatcgcttgaatctaggaggtggaggttgcagtgagccgagatcatgccactgcactccagtctgggcaacagagtgagactaagtctgaaaaacaaaaaatgagaaatgcaccttcctccctgcattttttggtcttctatgatgttgatttacaaagttagtcttggaccattttcttgtagaacatctgaaaatcaggacttacttgattatttccctgtcattcagttcaacttcagcactttgtggagagtgctccccaggccatgctgtctcactgcctccttagctggaggtccttgatgtcactttctcccatgatgtgtggcagtaaagttggtcactgggtaactgacaaatttccccaggatacactagtcttgtacttaggaaataacctatgcatctgtactttgatactacctaactatccttttttccatcatcccttcatcattgaggaaccttttcagaatgggttattacactgatagtagtgacatgatgcttttctaattttatcattccatctatattacaaaaaaacccctaaatattggctgtacccactttagtagaaccatggcacccagctagaataccactgccagaaaagaaactatttttaaactatttggcaaaaataacagaactctaaccagccaatgggttctccttgcctgctgcctagacaaagctgttttatcaagacagggaaattgcaatagaaaatatgtgtaattcacccagagccagctgtatgggagaccagcgtgttgttattactcaaattagtctccctgaaaacccaggaactggggtttttcaggattatttggtgggtagggggtcagaaagtggaagtgctgactggtcaggttggagatgagtcacttcctcggtggggtccacagaccagatgagccagttgatccatatgggtgatgcccactgatccatcaagtgcagagtctgcaaaatatctcgaccactggtcttatattttacaatagtggtgttatcccaggagcaatctggggaggttcaaaatcttgcagctcctagctgcaggactcctaaatcataatttctaatcttgtggctcatttgttagtcctgcaaaggcagtctagttcccaggcataaagggggattgtttggggaaagggctgttctcatctttgtttcaaaattaaactataaactaggttatttccaaagttagttcagcctatgcccataaatgaacaaggacagcttggaggtaagaagcaagatggagccagttaggtcatacctctctttcactgtttcgatttcctcagctataatttttacacaggcagtttcaactccacctgtagctacatcatgagcttgaagaaaagaatcaataatgaccacaatttccagtcactcctcttctgatagaaaggccaagaagtagctcttagtcttggttggggatctcttggccaaaaagaaaaaggaaagagaaaagataactgaaacagtgacaactgagagaagaatgatagcgttttgtaagcatcaccattttttcagcgttaaatactcagaatggagtatggggaacttctaagttcacatggcatattcaaattctccttgtttagaatttcaagagctattacttttctttgattcagttcgattatctttcatgatcctcagaaattgtacttttctccccatttcagactaagaaagtccttagccaaatggcctcaaccatcggatttgcctgtaggtgtcattcatttttgttgtttcttcccacctccctggggtttttcagtagtgcttcctttcaatcaaaagctaattttttttgtgtgtgtaggtggtatagaattccatgcttttacacagtagcaggcctgtatttgatgtacctggttcagagacaattgtcctttatagctttcgggagtaaattcaatgagagccccctgcgactagtttgtaactcatttagtgagagttctacaggattatttcacaaagcagttctcagcttaagaagctaaattggcttcatggggcctagctggaggcctcttcatccctgcattcagaggatatttacatgcatactacgaatctttctagaaaatgggaggagggttcgtattgacggtcgtacatttcctcaacttagctgtccgtgaagggtgttgggatgggtgtttgataattagggagaatattttgtttcataatacatggacagctctgtcatattggcaagtgcgtttgacatgcaagaattgtacagttataaggagtgacccgtggcaaaagcagaccatgcatttgcacatttaggttagtatagtgggtaagatgagagactttggagtcacactgcgagagtcccagtgctggactacactttgggaaggtacataacctctctgaacttggttttggcacttgcaagatgtggacaagtataattgtgtgctgggcaggatagcttatgtgtattaagtgctgtgattattcttagatttctttgtctaagagttcgcacactgtgtattatacaataaatacattcataattgaaaaacctggccaggcgtggctgctcatgcctgtaatcccagtgctttgggaggccaaggagggtggatcacttgaggccaggagttcaagaccagcctggccaacatgatgaaacaccacctctactaaaaatatatattttttaagtattagccggtgcagtggtgcatgcctgtagtcccagctacttgggaggctgaggcatgagaatcacttgaacttgggaggcggagattgcagtgagctgagattgtactactgcactccagtctgggtgtcgtagtgagactctgtctcacaaaaaaaggaaaatgaaaaacctttgtgttatgcatattatacagagccctttctaaaaagaacagcagggcgacccctgcctgagttcctggtagagctgggagaggagaccatttatgcactgggagtgacccagtcatttttgtcagatgatagaaactgcttttcttcagtatatctctgtcttagtcttagctgttgtgacacggggcaactctagtatcttctgctttttctacagcttaatttctatctaatttgtactattatatttaattggaaaattgcccagaaagcagagtctgcatttgtaaatgaagaaggagaagcattttaaacgcactaacaaacctcactttttaaaacaagattaacgtcttttacatgaaggaacccttttgaaagaatttgggaaaagacatgagaaaacacatttgctttgtgaactggaattttatatttggaactggcttcacagaagacagagatgttaagtaatatttgatgggtgtctactgtgggctgtatgacttcctaagcatcctattatttaatcatatagttgtaaatataaaacttaacagtttcagacttccatgtgtgtgaaattggagatttggagactttagacacacgttccaatgtcagggtaggacgattgagtcagccagaatttcacatgtatctctccaacttcttttctttctgtccctcctttaacgtctctgcaatatttcaatttcagaaaattgaaagaataataactaccagccattgggctttcttttgtgtggtactaggcagtaagttggacattgcatacatattaattctaagcttcctccatgatggatattatctgcagttgtacatttcttctcctttctcttagctatccacaaagggtctttggatgggtgcttcataattagggagaatattttgtttcataatacaggaacaagagtgtcatatgggagggtgcattttacatggcaagaattgtgcagtcctaagaaatgaccagtggtaaaatggagcgtgcatttgtacatttaggttaggatagtgaataaggtgagagactttggagtcagattacaggagtccatatgctggctccaccatgtaatacctttctttgctttgaagagatatacatatggggaagcggaagttctgctactaagtaatggaatttgctatctgtttagttttgaagctcatagtcccctgagaaatgtcgtgtgtgtgtgtgtacccacctgtgtgtagatgtgcacagagagctccccctggtagatgaaatagaggttattctgttgtaggcaaatgttccctggacattaaaatactggattccagttctattcatccaggcaagttgctgattagctgtttttttctcaggggtttcttgagcatgtgattatgcagagagagtggagatcattggctgggcacggtggctcatgcctgtaatcccagcaccttgggaggctgaggcaagcggatcatctgaggtcaggagttcacgactagcccggccaacatggtaaaacctgtctgtactaaaaatacaaaagttagctgggtgtggtggcaggtgcctgtactcccagctacttgggatgctgaggcaggagaatcacttgagcctggaagacagaggttgcagtgggctgagatggcaccattgcgctccagcctgggcaacaggagtgaaactctgtctcataaaataaaataaaaaagagagtggagatcaccctcttccacgtacccatctctctctgccctactggatctcatgtattccctaaaatgtattgctcaatacagggtgtaagtttaccaggtggtgttataatcagttcaggcactaaaagaaagggttaaaatcatgcggaatcacagagaaaaaataatgatctgcctatcctttttcctgagagtttcctgatgccccaagaggaaatattcagtttggtgatcgcctctttttgatgacatttgccagttttccttgtactagagggagaattgagcctcaggctgacaatgggatccatctagaatcgaggattgtggctttgctttggtcctatttgttttcatttgttgcttctcttcatgatagaattcctggttttcaaattatgctggtaatgtgagtgccctgttcatttgtttttcagaatttaatgtatgccaataaaaaggtgaattgtttgaaggaagtaagatttttacttcttattttacagaggcatgccattcagtagcactggaacagagaggaggagaaactggagagcagaaaggcaggtggcattagcatatgtcagattttcaatgaggactacggatatggcaatattgggaaggtgatctctgaatgatggaaatttaggaaagatgtttaaagtgcttgtctctcattgcctagcgatttactggcattgtagactccaccccaatgcttttgttcaatttggcgtttaggattagtcatgcacgtggaagattccagcctccctccgcccagtgttacagcttggactgaatatttattaactacccagggaacatcacactgtttgaggacacttgagttcatctatatccacaaaatgtgtcctcatcatgttgaagtggaacagcaattcataagaaatgacaggagcttagcaagaatatataggggaaaatcctttgtctagtaagagtgtgaagtgcccaggaaggtgcttccagcaaataatgctgaatgttggtgactgctaaatgaagaaggaaacacgaagttcagatttaacagaaccatctagacagccatacttcccatgaccctgggaggccgacaagatcccatatttaacctatccttaccaatgttatgagaaaaacaagaatgcatgtgcgattataaatggtggctgactttcaattttaggttgagatacaaaagcaggtggtgggggggtctgtggcaaactcggcaataaatgccccaggtgaagaggctgcccagctctcacagattgttgacatgtaggaatcagtgcctctgattttccaggaaaagtcaagaatctaggtttttaatgtaaaagctcctgtttttcaattatgggcaactagtttattatttaaactacttgggctaggaccctaaataagtatgttcaggttgtggattgtacaactcaagggacccagcacgctcatctttgtacttttttttttgagatgtttttattgaggttcacttactatatggtatgcgtatgccacaaaattcacctatttaaagtgtacacttcagtgttttttgttggtttgtttttgagacggagtctcattccgtcgcccaggctggagtgcagtggcgtgatctcagctaactgtaacctccgcctcccgggttcaagcgattctcctggctcagcgtctggagtagctgggactacaggtgcgtgccaccacaccgggctaatttttgtgtttatagcagagacaaggtttcaccgtgttggccaggctggtcttggtcttctgagctcgttatccacccgcctctgcctcccaaagtgctgggattacaggcatgagccaccgcacctggccttccgtggtttttaatgtattcacagagctgggcaatcatcaacacaccatcagcgcattctaaatttagcatatttttattgctccagaaagacacgttgtccccattagtactcacaccctgtacacccttaccccaccctgtagccctacacagccagcattctgctctatctctataggtttacctattctgggtatgtcatgtaaattgaatcatgtaatatgtggcctttcatgtctggcttctttactaagcataatgttttcaagggccatcaatgttgtaccatgtgtcaatttaattcacgttttgtagccaaataatattacgttatataaatatacgacgttgtgtttgtccattcattggttgtcaaacatttggattgtttccacttttcagctattagaaacaatgcttctatgaacattgatgtacaagtttttctgtgtacttacgtttttatttctcttggatatatacctacaagtggaatttctgggtcatatggactctatttttaacattttgaggaacttccaaaccgttttccaacgtgggtaccccattttacattcccaccagcaatgtctctggcttcccttttgtccacatcgtcacgaatacttgttattatttctctttgacaatagccattttgataggtatgaagtacagctcatcatggatttgacttgcatttccctaatgattactggcattaagcatctttttaatgtgcttgttgggcatttgttgtatcttctttggacaaaccctattaaaaaaatacttcgccaacttttaaaatagggctatttgtctttttattaagttttattgttggaaacttttttattaagttttatataagggttttaatggaactttttatttttaagttgtatgtaagggttctatattctgaataaaaattttcaaatcacatgtgatttgaaaatattctgtttcattctgtggatttcctttttacttcttatatgggattgtcagcagcacaattaaaaaatggatacagtccaatttattttttattgcttattcttttggtgtcattttttagaatctgtttttcaccccaaggtcacagagatttactcctgtttcttttttctgggagttgtatagtattagctctaacatttaggcctatgattcattttgagttaaattttgcatgtggtgagataaggatttgcatttgtatctttgcatatggatatccagttaccccagcaccattcattgaaaatcctattttctcactgaattgactaggtacttcttactgactttgaccctagggtgcgtcactgcagttgtttaattgtagaatgtaaatatatgaaggtatattaattctcctactagggaaaaattaactgcaaaaggaggggtcccactcctgtgttcctggcatttttagtttctgcatcagcctcaactctaggataagagatgggtaattcttaatgagaacagaacttcagaataaaagtctcagctggaaaataacttgattttcagtaggcttgttcatatgttgtatatatgtgacttagataatcattataaatacagttgattctaccaagtcttttgaactgtaagtcttagctgggctctgagcaaagcccttcttccttcttggatatacatgcatgcacagccacacacaatacacaaatgtaccctggtggataaggcatttacaattgagaacagctgatagttctatatagtgctatatcgagatagagaaatagctaaagatgtaaatatacacacccttgatacattcatacacacacacagcattaagttaggcagcccctggtttctgccactagcacagctttctgaatgaatgagctctcgagaggggaacttactggaaagctttcttatcaacttggtaaaggtttgattttcttgccccctacagtggctgtttgtcaccctgactgcagctagaattgctgtgttctgttctttttctggagaaattacaaaaggagttgacatctactgtataaaatgaaacctagcaaattttataaattactaaggacgattctctaatcttcatatctcatctccagcatccaaggaggtggagaagtagttgggtgcgtattcacctagactttgttttgcagtaatgtgtgccagttttataccctaaagccatctgagtccccttttcctttccctgtctccattatccatctggataagccagatcttcaatatcctagcctcctttaaaaccagggacccaaccaggcgcggtggctcacaccagtaatcccagcactttgggaggccgaggtgggcggatcacaaggtcaggagtttgagaccaccctgaccaacatggtgaaaccctgtctctactaaaaatataaaaaattagccaggcgtggttgcaggcgcctgtagtcccagctattcgggaggctgaggcaggagaatggcgtgaacccgggaggtggaagattgcagtgagctgagatagcaccattgcactccagcttgggttgagagcaagactccatctcaaaaaacaaaacaaaaccaaaaaacagggacccaattctggctgctgaaacatcagaaagaagtccacaggaaaggtagccaggattttcttccagtttaaaaggagcaagccacataagcagccacctttttctgcactgacagttacctgtgccttgcctttgggtgtggtgttgatccttggagctgccatggccatcttggcaccatgaagtgagtatcctcagaacaaacatttgttgggctaaagagggtgaaacagaaaagtagaaggaactttggtccttaataacaccgggagttgctcagaaagtccagggctgccttttattctggaattcttatttaagacaaaatgatatctttatggttatagtcactttggtcaggtttggttttctggtacttgtggcagaaggcatccttatagatgcacctatacatataccaatgtatccacatccgtgtcttcacacacacatctgtttcctatatgcagaacatgcattcataaatatgtagggttttttaaatgtgatcagacactatatagtttctaacttgcctttttttcattccactatataattaagacatcctttcttgtcaggatctaaaattattatttactcttttaaaagactgcatgttattttatattatgtatggacctgatttatttaatactctcctattagtagatgtttaggtagatgtgaattgattggccagtacaaagtaaaagtgtaaccagtgttataaaactaatgttcttgttatctcccagtaatcctattaatcagtctgtagaaaataaagaggacgtcagaccgatatatacaaagatgattattccaatattaagcataatggagaaacatgagaaacactttaaaagttcaatataaaaggacttgtagtttatgatctatacatatgataaacagtattatgtgaccattcaaaatggcttttaagaatacgtagtggctggctgggcgtggtggctcacgtctgtaatctcagcactttgggtggctgaggcaggcagatcacgaggttgggagttcgagaccagccggaccaatatggtgaaaccctgtctctactaaaaatacaaaaattagctgggcatggtggcatgcacctgtagtcccagctactcgggaggctgaggcaggagaatcacttgaatccaggagatggaagttacagtgagctgagattgcgccactgcactccagcctgtgtaacagagcaagactccatgttaaaaacaaaacaaaacaaaacaaactcctctgtttcccatcccagtgtcagcacgtaaggtgacaactgacaagatctgtctcataatgtgaataatggttttctctgggaggtgagaagatgaatgcttttagattaaaataaataccagtcagtatgttccaaatcacctgatacggtcatttggcgttatccatgtacttgtacaaatttttctcttctaacccacatgtttctactgttctcatccaaagacgtgttgcaaatcattatccagaacatgggtattgataactgcaatgttcttggggctttgcataacttccaataaagcaaaaccacatctctgaatccattttaaatttgcagtcagccaggggtcctctaatggttgtgcgttttggggaaattgtgacctgggtctagtaatgagtctcttccttgggagttaaagtactctgggaacatacaccatctatctcagaatactttgctgaaataagaataacaaggacgcttcaaaaaaatactaagcgacacacctaaagggcttaaacactaataagtgagagaatctagtggctaggaacttcagttctcaagccagtaacaaaactcctaccatttcttacttgcaaaaacttgattttcccccgtgtaaatcaggctaatctttttattcctttactagtgacactaatactattcagcagccatatggcagagtgcttcagaactgctgctgtggagccgaacttctccactactctgtttcccatcccagtgctcaccacctagttaagccatcttgagcaggtgcgtgtaacttaatgcaaccttcagttctgtatttctgaaaggcaattaatgagagcacttagcttagagagctgtgagcattacatgagctaacacttgttaggcaactagaacagcaccctgcacatagtaaatattctgtcagtggtacaaagtgttaacccacaatcaacaaagcattgaacgcagtccataactcacagtaaggtatgcaacatgttgtcctattgccatcttcttcccaaagcccagataactgcaaagggcatctgggtggcactgctgggactggaacatgtagaggaagagggttagggaagcattcatgggtttttcaagctcatttttctcacttcccttaccagacccatcacccaatttagtaggacacagaatcagattattattactttttgtcttctcaaagacacatttttccttgaaattaatggtggtgctgatgaacacgaaatccaccagacagaatctcggggcttttgttctcagtcctcccctacctggttctctctcctcccccatttccctcctgcccagcattgagctccagctgagctactgtcaggaggctgctctgctaagcagtctgtcacatgttccgttacaatcatgttttattatagctttcaaaagatgacctctcattctgcacactcgtgttcatagaggacttctggcattctgaaaagaaccagatagcagagtctccaaaccctttatttgcttcagctgataactgctctggccagagacgaacgctgtggtgattataagatgtaatttactacaaaagaccgttaatattacttacaaacctgccatcatttctggggaaatcagaactgaaacagtggacgggacacatctgaatccacctaaatatcttggcctgatagaattacaagtttatagatttaccatttaggaaacagccccgttatgaaacatttgtcctcacagacagacagtataagtaacaagcaagattatatccttttatgtggatcaaggacatagtcaatgtaagaaaaaaaagatagaaaaaaaatccctttagaggaacgtaaatgctgcccttgtgaattataactggggaattagatctatgaaaaagcctctaatatgactaaacaaagtccctcaggtgatactctgagtcagaaaagtgtgagaaaatatagcctcttaaatgtgattatagtcagagctgcagttactccctgagaaaggacatagaaggtagaggaatgaaagaaaaaaacagtgtttgaaaactttttgtgtcagaccagaaattatagagtagcaacagcttagggatttaagtaacccctttagcctagttgtaaagcctttgggctttaaactgaagaacagaaaggaattagatatccaacttagtacttgtttttttaagatcatgaaatggaagagtcttttttgctgaatgacgaattgaaccagcatataattccaactagggctataattagaaagatacggctctagtatttaagcttcttacactctcccctctctcatgaactttcattagagtttcttgtctacttggttatatttaatggagatgaaggtgagagttacggtgcttttgttggtattgtggccagactccgggagagtcctaaaatcggtgtttgtcatttacctctcctctttgagaaattttaagggaactctacatacaagaagctataccagcgtaaggatcctggaccattctactcatagttttgcaagcaccctatgcttggagttagctctggttaaaggctgtaaaaggaccactgttcctccatcctatccccagtccaatccttgggactagctcgctcaggaactctcagaggtacatattaaaaagaacgtataagaggtcagatctgtaggagaggcttcatcttaagtcattctcccgggtatatttgttgaggtcaagagcaaggaaggagaaaagatatagctgagtttaaccaaagcaaacaggaccttgctcagccaactagtgctgcccgcatggaattgaagatgttaaagagaggggttagagcttgaagaggatgttaaagagaggggttagagtcacagtttgtgcattttaaaggacagtgaccttgactagtggtaatggggtcaaatcattaattcagaccattcagataaacaactcttctctcttgtcaggtaggacaggggatggaggaatgaagtacctagaagcagcttggtaggagaacaaaggcgtcctatttctctcctttccctccattattcatttattccctaagttgtttattggccatttgtctgtcttctttggagaaatgtttgttcaaatcctttgcccattttttaatttgtagtttgttgttgctgctgttgaattttaggagttctttatacattctcggtattcattcctgataagatagatgattggcaaatattctctcccattcagtgggttgccttttcactcttttaatagtgtctttgatttgctaaagtttttaattctgaaaaagtccgacgtattctttttcctttttgttgcctgtactttttgtcctgagctgtttataaggaaaacagcaaaccgtttgtctgagtataggatggtctctctagagcaagaagggaaggcaggtgaatctcatgactccagctggaaggagagaggatcagtctgtgctgaatccccaacagctgacctccaagaggtcttgatgttcttacagaaaggccacctgcaggacagggttgtgtgtgctgctgggaggccaggcggggactcctgggaaagccttctcctggctccagttccatttggctcatctccaaggtggccaggtactcactgatgcatggacagctcatatgttcatctgtgaactatgtccaggctcaagatgagctggaagtgcaattttttttccacttgctgctttatcccttctgtgcattcctcttgctatcatttagcacctggaaaaatgtagaattcaagatcagaaagacaactggagctcatgccccacacacccccaccatcacatgcaaatgaaattactgaggcctggagtgcttaagactctttcccaaatcctgtcactaataaaacgagagctggagattgggaatcctgacttgagccggtgctgttattaccctttttctaatcatcagtgcacccaaggaaaaagaagtttcccaattttatttatttcagtaagtatttactgtcattgtctactcttcatcctagtagcaaaaaaataaaatttgcaagtggaaactaatcatcaccgttgtggtcttagctgaattgttctttacagatctaaagagagaccacagaaagatctgaatggcagcatgccttaagaacaagattgacccagcttacttgtctcagggccaagtatatggcagaactcagtcatctaaaggagagactgaccccggggaaaggcagcccacattgccagagcttctgattttttcaagagaacctggcagttggagtcttgtatgaaatagcttgatgtatacaactaaaggatttaagggaatctgtttcttaaaatttaatatgaaggccaccatctcctgcacaaaacaaaaatctttttgtgttatcaaaatggactgttgatttaagaaccttgctcttgctttagatcagagccctcaaacacattggaatgattcggagagctttagaaaacatgcatgccttagccccactccacactccatgattctgagcctcttggggtaggctctgggcatcagcacttgagaaagcccccccgggcagccgctatgtgcagctgggggttatgcaccactaggctgactgtagtgtgaacattgaggatcctaccccaatcctcttctttcccatgggtaaggacatctggactgtgattgctggacatcaggatggccttaatattagggttaacatctgaatcattggctgccttttttatttctcgtcctgctgtttgggtactttatagacatagacagttgtccatgtgaccccatttgcctcgagttgcttctgtagagttttgatcccacactttgtgatgtgtctcagctctggggcgagggggctgttcagtgaagttggtttgtggcttcttccctctgatctccttttcttctcccagccttgggggttctgcagctaactgtggtcctttcatgtagctgcctttggtctgctggggactttgaaggtttgcctttgaaacacccagatccctttttggttccttcctctaccccatctgcttctctccactccccttactgttggcagcatcccctcgccttggcagtccagcttttgagagtcactgtgatcaacccagcaattcctactggggaaaaaaaaaagaaaaagtagggagccatgataggtgcaccatgtctatcaaagccatcaaaatggctattttagaaaaaaacctcaataaatattattgttgatcttgttacacatgataacagcattttcttatttttttaatttattttttttaagagatagggccttgctttgttgcccaagcaggacttacagtcttgcatttaagtgatcttcccatctcagcctcctgaatagctgtgcattcttgttatataagaaagtatctgtaatttttagtggcacaattggattataaagtagaggttaaatgataggaactctggagttgcttcaaatactttagaaaataaatgaataggtaaatagcaaggtaaagcaatggtggcaagctcttaattactgttgtatatgggtactgagtatataaaacccattatataacatgttctacttttgtgcatattgaaactttttattaagcatatacacatgcacacacacgtataattgtcagccctataacattctacaattcaataggaatatatgattccaagattctataattctttctttcttaccaattaattggtgcttgagattgatgtaactgaatgaatagatgacttcataaaaagtaaatgagcttgggcctggtggcacacgcctgtaatctcaacagttttggaaccttaggcaggcaggttacttgagcccagaatttgagaccagcctgggcgacatggcaaaacctcatctttaccaaaaaaagtaaaataaaattatatataaatataaatgtatttatagtgtgtgcatatatataaaaatatataaacacatgcacaacgtgtgtatttttatatatatacacacacaaattagctgggcacagtggtgcgcacctgtagtctcagctactcgggaagctaaggtgagagtactgcttaagcccaggagctcaaggctacagtgagatgtgatcaaaccactgtactgggtgacagagcaagaccctctctcaaaataaaataataatttataatgaaaccaacacatacaattaaagaaataaaaaataggccaaatagcatctatacttcaccttcccaacatgttagcttttacaggtagctgtctggcatttgtttcattgctgtccatctagtttggagttttgctttattgatttatgatattatcaagcacagactgtgaactggatcttatattgtggcaatattagctttctggctgctttgaatttgcagtcttaacccccaaagagagaaatcagaaatgacagcattttggccaaatacaagcgtccagtgcatttgtcatcggagtgatcggagtgaatctctcatttttacttgtgctgctactttacatgtagtgacttcaagtacagagtgaaaacttaatactcgttcattgttccagaaatatttattgggtactggctccccgccaggctctgggcagggcctagatgctgtgtcagcgaacaggagagattcagtccgtgtgttcgtggaggttgcatttagacgggcatttcattatgaaacaacacacgggaaactatacttgaaatatgcatcctggcaggccacagtggctcactcctgtaatcccagcactctaggagtctgaggcgggtggatcacttgagggcaggagttcgagaccagcctggccaacatggtgaaacctcgtctctactaaaattacagaaattagcggagcatggttgggggtgggggcagtgcctgtagtcccagctacttgggagactgaggcaggaggatcacttgaacccaggaggtggaggttgcaatgagccgagatcacgcccctgcactctagcctgggtgacagagcgagactctgtctcaaaaaagaaaaaaaaagaaatatacatcttataatgctgaatgtatttccagtaacatgcaagtgttgtggggagataggcagagacttggacaggtaatcggaggctaaaataggaatcctgtgaagtactactgcctttgatattttttccaagccaatatattagaaagccacttcttcctggaattcatgtatccagacacatttttatcttgatgaatttggggttgcatgtctcaaaaatgactgtacgtgttttaaaattttatgttctggggtacatgtccaggacgtgcagatttgttacacaggtaaacgtgtgccatagtgatttgctgcacctatcaacccatcacctagttattaagccccatacgcattagctgtttatcctgatgctttccctcctccttcccctctacgaggccccattgtgtgtagttcccctccctgtgtccatgtgttctcattgttcagctcccacctggaagtgagaacatgtggtgtttggttttctgtgttagtttgctaaggataatggcttccagttccatccatgtccctgcaaaaaacatctcattcctttttatggccgtatagcattccatgttgcatatgtaccacgttttctttatctggtctatcattgatgggcattttggttgactccacgtctttgctacagtgaatagtgctgcagtgaacatacgcgtgcatgtatctttataatagaatgatttgtattcctttgggtatatacccagtaataggattgctgggtcaaatggtgtttcttgttctgaatctttgaggaatcaccacactgtctttcacaatggttgaacaaatttacattcccactaacagtgtaaaagcattcctatttctccagagccttgtcagcatctgttgtttcttgactttttaataatcgccaaaaatggctatacattttttaatatacctgaggctgctgccttccaaacctactgactaatagtccctgagagtggaagtcagcactctgcattttagcaagcttcctagagaatttgtgggtgaacagatgagtgttcatctgactactgattggggacaatgacagaaagatatcagaatgtgctttgaaccatcttggaacaattcattgtggttattaggattaaaagggaagagaaatgtcagctctcatattcacatcccttaaaaatcaagcattaggatataataattcatttaatataaatgttataaccatatgaccaatttccagttatcataagcagttaggtctttcagtctctctcctctctctctctctctctcgctctctatctctcttcctctctctcttcctcctctgtctctccttactctttcttcctctctctcccctctcttctctctcctatctatctcctctccctctttcttcctcctctttccctcttcctcctctctctccgtcctgtctccctcctctctctctctcctctctctttctctctcttcttcctcctctatctctcctctctctttctgtcttcttccctctctgtattatgtctgcctatgtgggcatgtgagtgtgcaaataagaaataattattttagaattttgtggtttccccctgctgtatatggttccaaaattcagtgtctacaacatagctcccgaataatgtttcacatcctaatgagcgatcatagaatgggagaacaaacttaacatgacttacatcctcatttagcctttaaaattctctttgtccacaaacctccttgtttctggagttggcaacatactgaaatagaatatatacaaacttggaaacagctatgagcttgacctaaaaccttaactctgaccctttactgggaaggctttggtaggtgatacatcctctgtaatattttatcttctacatcaaaaaagtccttcattgtacagaattttgagagaaattaatgagacaatgtctcatagcacctgaaacaacgggttctcaagaaatactatttcattgattactcctcactttcttaactcttaccagacctattttgagtctgtatccttggtatcatcattttttctcaaattatttctaaggcagcattggtttgtgttataatcattaatagatacctgaattaagtgaaatatttcaaagtaaagccatatagtatcctgtggggaaaagcctatcttttgagccagaaagactggcttaaatcccagtattattgttcacctctttgtgggttttgtttatatgtttatacacattagttttaccatctgcaaaatggggataacagttttcacccttattcgtttcctgttactatttcccaaattgtcacaagcttagtgacttaaaacaacagaaattgcccaggtatggtggctcacatgtgtaattctaatattttggaaggctgaggtgggagaatcgcttgagaccaggagtttgagatgagcttgggcaacatggcaagaccccatctctacaaaaattaactagtcatggcggcacatgcctgtggtctcaggagggtgaggtagaaggatgacttgggtccaggagtttgacgctacagtgagccatgattgtaccactgcattctaacctgtgcatcagagcaagagcttgtctcaaaaacaaacaaaaacagaagttggtcatctcatagttgtagagatcagaagtctgcagtgtgtctcactggactaaaatcatggtgccagcagggctgtttttttcttgagcctgtagaggagatcttttttcttgcccttcccaacttttagaatccactctgctcccttgggtcacagccttttccaagttcaaagccagccatggccaggcaagcctttcttccatcaggtcactctgacctgacccttctgtctccctctcccatatttgaagacccttgtgattacctggagcccatcttgatgatcctgaataatttccctatttaaggtctgctaatcagcaaccttgattcccttttaccatgtcatatgatacattcgcaggctccaggacagacatggacatctttaggggccacaattctgccttccacagccactttatagatggttgttgggattactgggaagatgtagtaaagttcttagcacagtggctgggtatggagtgtagtatgttctgtagatggagaggttgacgtggaaaatgattttcttttttctcttttttatttttattttttgagacagggtctcactctgttgtccaggctggagtgcagtagtgcagtctcagctcactgcaatctcctctgcctcccaggctcaatcctcccacctcagcctcccgagtaactgggacaacaggtgcatgccaccacacttggctaatttttgtattttttgtaacaacggggtttcactacattgcccaggctggtatgatttttctaaaatcaaggcatttccttaatttaaaaaaaaatttgtttatttctttactggattagctgtttgggggaatcctgaagttaaccctatgtaaagattcacccagatggttcagtgtttccttcatagataaccccctttaaaaacactagcaatgggtcaggcatggtgaatcaggcctgtaatgctagcactttgggaggccgaggcaggcaaattacaaggtcaaaaggtcaagaccatcctggccaacatggtgaaaccccatctttagtaaatatatgaaaaatagctgggtgtggtggtgcgcacctgtagtcccagctacttgggaggctgaggcacgagacttgcttgaacccaggaggtggaggttgccgtgagccgagatcacgccattgcactccaggcctggcagtagtgtgaggctctgacacaaaacaaaacaaaacaaaacaaaacaaaacaaaacaaaaacccactaacaatgatgatgtgggggaaaatggccagacagaaataaaataagaacggaggtagatgacattcaaagtgtgtttcatggacctcacgttgattctcaaagcctgaagctcttcggtgtgcattagactaaattatcattctgctgagagtgcatctatgttttcttttccactgtttgtttttaaatgttgtaaaaacaataataaagtatggcattattagtaagcatgaattatggaagaaactcatctggaccagggaaacattgacattcttatttttttagaggaagacagagtatcccactatcacccaggctggagtgcagtggtgcaatcatggctcactgcagcatcaaccttgccggctcaagtgatcctcccacttcagcctccagagtagctggaatcacaggtgcatgccaccacactcagctgatttttttgtactttttgtagagatgaggactccctttgttgctaagactgctctcaaaatcctggtctcacaggatcctcccaccttagcctcccgaaatgctgggattaccggtgtaaactactacaccccacccgatcaacattatcctgattatacattaactcaggtgagcttcatatatgtgaagaaacactgaaagatcagattgcgaagtggtcttgttactcagcagcttccgccaaacaatcactaccatgataacatcaccaacaaaatgtctgtgactttcacatcccctgctttgagaagtagaaataaaaatgttctgggcatacataccacttatgaattgactgccaaactgttcttttaaaagtaggtcatttgatatgcctgttccactgataacatatcttaatatatagtagaccataaaatgtggaagatcataatatacaatctgcattcacttagcagcaactttttccttagctggagcacagatatacttaataccaaattagaagaaagtgtatgttattgtggaaataagattttaccattaaggcctaagaagcaaaagcaggaaaccaacaggaacccataaatggttggagatgacaaagtggactgtaatagtctttgtgtagttatttttttgagggggaggggacgaagtctctctgtcacccaggctggagtataatggtgcaatctaggatcactgcaacctccggctcccaggttcaagcaattctcctgcctcagcctcccaaatagctgagaatacaggcgcacaccaccacgcctggctaatttttgtatttttagtagagacagggttttgccatgttggccaggctgatctcaaactcctgacctcaggtgatccatctgcctcagcctcccaaagtgctgggatgtcaggcgtgagccactgtgcctggccgtcttcatctgcttttacatgatgcttcctgtttccctcggagaggtctccttggatgctctttgcccccgtgtgattctggtactcatacaacttgacatttcttctcatcacatgagactccacagtgagcatggtttttcctatccgtgttccgctgttcaaggaaactgcctgcagatgctcagagctttctttctcctttctttgtgctttatcagagcaaggatgattccggcttaccttgtccgtggcttctggatattttcacccagtagagggcgtgagtggaaactctgaatgcaggagaagccagaactcatcttccccttctctctctgcttcccaaggcaccctgagtcctccctcagggccctcctccaaggccctgtctcccgctgggcagtgtccaccatggcacgtgaccctggtttctggtctctgaagacacctcctcttcccattggttgcaagggttttggtagcttctgcagtcacctcttcctcaattctgttaccgttccttctttggcctctcagatctcccgagtccccttgatgaaaaaattccttttggttgaaaagtcccggaatagttcctgtttcttgcattattctaatatatttacgtctaaaacaaccctcccctcttgcatatggtacatgatgcatctagggattatccctggtaagaatttgctcatcttttattttctgtttgtttaattattttgaaggaattttagactcagggtaagtttagctttatagagagtcctagtatactcttgaccaatattcccctaaatgttaaaattttgcatgatcacaacacatttctcaaaactaagaaaccaactttgggatgatattacaaactaaactgcaggcatacgtttttaataaaaccaacattgccactgcttttaaaagtagtaaataaaaacacatatcatgtatgcatatgtgtgtatgtgcagatctctaattacgtatattgacttatttaagtttcacgtgtacttacagcacaaactacttttacaaggcagttggaattggatggtgagcttgccatgaggctagagccattcatttcccagatgttaaaaacatttgtttggcccgggtgtagttggtcacacctgtaatcccagcactttggaaggccgaggcaggtggatgacttgaggtcaggagttcaagatcagcctggccaacatgacaaaacccctcctctactaaaaatacaaaaattagccgggtgtggtggtcggtgtctgcaatcccagctactcaggaggctgaggcaggagaattacttgaacctaggaggtggagactgcagtgagccaagatcatgccactgcactccagcctgggagacagtgagactctctctcaaaaaaaaaaaaaaaataataataataatatttgtttgttccagagggctgtttccttaaaactgaaagtgaagattaccaaattcagtttgacaaacaaagcccccgtacagttcacgtgccaagtgagagaaggcaggtgccagtcccagcatgtgtgtgtgtgtgtgtgtgtgtgtgtgtgtgtgtgtgtgagtgtgtgtgtgtgttttggaattcacaggataaatactgtggtacaggaactgtcaggcctgattaatacttttgcactcgcggtgcatgtgccttgatctataggcattatgcttgctgcgtgggtccctcacaaggcagccattagcatcagcttccaagcagctcccccactgtgcacttcccttccctgtcatatgcttggctgtcatctttgctaaaggattttcaggttggtttgcaataagggtaaacttgggaaggatggagagcaatttcctttgaatgctcaggatggtgggggctggttcttagcacacagaaaatccatatgagaatgcctaggacaaagcgggggaatgatttctgtatacggtgtggtgtttagtacgtgaaacccttaggcccccttaaagtcttccgctccaacccttaaacagttaagcatatagattagcatcacttacatgcaaggacattgtaaaatatgatatgtttacaaaatgctatggaacgctagatgattattaaacataatgaggttgaaatctaattccataatatgaagatgcccatgttttattcagtagaataagcaacttgtagagtaacataagtagtgtgttatctcattttttaaaaaaggtagataagtaccaaggagggcagatcactcgaggccaagcgtttgagaccggcctggccaacatggcgaaaccccatctctactacaaatataaaaaattagccgggtgtggtggtgtgtgcctgtaatcccagctacctgggaggctgagggaggagaatcacttgaatctgggaggcagaggttgcagtgagctgagattgtgccactgcactccagcctgggcgacagagtgtgactcagtctccaaaaaggaaaaagaaaaaagaagatagattcagatactgcaataatttggaagctttatacagcaattactaaccagagtttttcttttgtaagtgagtttaggtgaaactttccctttctacattgtaagttgctttattgtttgtagattttataacgaataggtaatatttttggaattcccaaaaaatattgaatttcccatgtaagataatattttctacagatcatatcattcagatcttgtttcttctaagtaatgaaattctgatgcatttcatactgcctgctgcaagtaaggatgtctgaaatggacaataataaactaaagatagaaagaatcccttctgagtcttacactggatggacttcctgccctccagccatctttaaatatcatgccaggtatgaagaattaacatccctgatttttcttttagaaagaatattggtatctgcctagaaagaagatggttattaaaaagaataaaagcagacctgctttttcctgcccagttaatctttaccgggacaggacaaaccaatcactgcggaatgttttgtgggtgtcctgaggctgctgtaactgagtatcacagactggacgacttagaacatcagaaatgtcttcgcctagttctggaggttgcatgtctgaaatcaaagtgtgggcaggcttggttccttctgcaggatctgaggaagtagcctctttccttactcctagtgatttgccccacagtctttggtgttcctcggcttatgggtctatcactccagtctctggctttatcttcgtgtggcattttccatctgtctctgacttcacatggccattttatttatgaggacatcagtcatattgacctagggactcaccctactccagggttacctcatcttaactaatcacttctattaataaagtgactctgtgtttgaaaatgtttgcatttggaggtatccggggttaggacttcaccgtatctttttgttgctaacagacactttaaaaatatagatgactgcatcccaattaccagtcgaattgttttgggcattatttattaagagaaataaccattgtgatgcataagatgatctgtgagccctgtgctgcagacgagggccatgtggatggtatcgtgaaaacagttgcacctttgcttaaggcaaactcattgtataaaatacagtttgcaaaacagttattttgtgggtggcctatttttccctctagaaatggcattttttactctataaaggaatgaaaacttcttatacagagaacttcccagtggatttagactagaatctcattcactggtgctaataattccaaaatacattcgtatttaagatcctcatgccagtaattctagtactttgggaggccaaggcgggtggatcacctgaggtcaggagttggagaccagcctggccaacatgccaaaaccccgtctctactaaaaatacaaaaattagctgggtgtgctggtgggtgcctgtaatcccaactacttgggaggctgaggcagaagaattgcttgaacccaaggggcagaggttgcagtgagccaagatcgcaccacatctctccatcctgggagaaagagcgaatctccatctaaaaaaaaaaaaaaatcctctgtcccaataaatatggccacaggaaaattcctcatttcctcaaaataaagaacttctttcacatgaaatgtccatgtgctttccatcagcctttccctctccaggagaacatcaatgcaaacacttgtatttccctcctttgaaagtctctctatatagcttccgtcttttctcatgcacgtgagaagtcagctctgccattaacagcagatggatggagacacagccgcatttcccttctcacaggcactgtctgcttggcacgtggaactgcgtttccttgctcgcgaatcctcatgtgatacgcatctccccatccctcataacctccctcggtgcagaaactatctgtgaacagtggtaccggtcccttgacgttgtagcttgacttgctgaactctgattctgaatccatatatagacgcagggacactgcccagttttgcgtttaggaaagtcagactgtcatcggtgtggagggctgtgcagcagatgaggacagggccccaatcccaaactgaagaatcttttataggaagtgtcaggcctttttgcaggagcaaatttttcatcattgtatgtgtatttaacttttctgttctttggtaactggataaacagtgaataataaatgaatgtctgtgctcatattctcctgtcctttaaaaattatattaacttatttttaatcagtttattagttatatgctatattacatgctataatctgtagagaaatccacccccaaccgtgcccagtgatagtgactcaaatacagtaaaaatgtttggtttttttttttttggccaggcgtgatggctcacgcctgtaatcccaacacttcaggaggccgaggcgggtggatcacgaggtcaggagatcgagaccatcctggctaacaaggtgaaaccccgactctactaaaaatacaaaaaattagccaggcatggtggcgggcgtctgtagtcccaggtactcaggaggctgaggcaggagaatagcatgaacctggaggcggagcttgcagtgagccgagatcgtgccactgcactccagcctgggcgacagagcaagactcaggtgatctacctgcctctgcctcccaaagttctgggattgcaggcatgagccaccatgcccggcaataagttttcttaattcattgcaaaaggcagggcttttctgacaagagtgagctacagccattattctgattaatgctgccataatctaacatcacggaatggcaaactagagactatgggccacctctagcctctgtctgtttatgtaaattaagttttattggaacacagtcatgctcatttgtttacatattgtctctggttggcttcctgccacgacagcagagttttgcaacagagaccttatgtcctggctttgaagatacatactatctgcttctttgtaggaaaagtttgttgattaccggtatacagtgttgatctttgagcagggtacttaagaacgtagaggtgctttggcccaccacgaagagttttggaagacgtaagacttaagtggtacaaggagaggtcctccatccctgactataagcacttgtccaccttgatctcatctgtatagggttcagtgaaacttctgcttggaaaaatacatgtttgaaatcaattacatgaagcaaatattgtctagagtgtgaaggaaagggaacctgatcttcctgcttggaggtctacaaagcctcaaaaacagataggcagttgcccttaacctatacagcagagacattgtgtatctaaaggcatggatgtccagctaggaattatgacactcatgcagagggacatgaggagggggtagtttgggtctgactctccagttcacttctcatggatgtaattgatttcaaacttgtatttttcctagcagaagtttcactggaccctatagagatgagatcaagatggccatgtggttatagacagggctggaggacctttcctcctaccacttacatgtgggggttccaaagatttactaaatgctttgcatgtgttccaggtgtcagagcccatcacaggcagggttttgactctcagggagcctgcagtcttgtggagggaaggtgggcaataaggaagaagagacagcatagatattttgtgcaatttcagccagaggaaatatggcaagacagtagacagtgggggataaagtacagcaattttcttttatttaggaagattagagaattcctccttgaggaagtgatgtgagtttcaataaggatggaaagtaccatggaggtctagaagtgtctgggggcaggggtaacagcaaaaacaaaacttttcaaacatggaggtggtgttggtgcatgctggtgtcttgcaagtgctttcagaaggctacccttatcttttcctatccacctggcaaatacctcctcatatgcatgcaagactttgctcaaatgcagcaatccttgtgtttgtttctgctgctctaggcgggaatcccatcccctttcttccaccttatcctaaccgtcagtgctcccagtgttacagggacatgaggaggggttagtttgggtctgactctccagttcacctcccagcaccctgcctagtggtctacccatcactgatacttaacagttattgaatatgattatgtgtataccctagaaaaataagcaacaaaaccgttcattgtaatagatgacattgactgaacacttacttaaaacgcagtttcaagcccttagcatatataaagccattcagtatgccaaataaccataaaaggtagggactgtcattatttatagaagaagacactgaaacacaggaagactagtgtgtcagaagtcctacattctgataatagtagcacacacttcctgatgttcattatacatttaccactaggcgtttaatgtggattttgcttataatcctcataaaagtctctggaacaaatgctgacatgatactcgtttcgaggaggagagaatcagaatacagaaaggtaaaatcacttctccaaggttacgtggctagtgcgtgagagaactggctttcaaattcacatcactttaatgtgatgtgttggtattagaaagggaaagcatttcaaaagccctcaccacagtgtcataaagctggctgctcatggtaaacattccaaagaatccaccaacacagtgtccttggagtccgtctgcgtgcctgtgcaactgcaccttgcttctcttggtgaaaaattcacctctttggaccctgtgttcactcttgttgttgtcctccccttagatgaggaaggagcagggccatccgtaaaaacagagtcatagggtgaaaacacatcacagagaatgcaaaagggttatttatagtccagagtgggaagctgaaaagacactgtgagaggaacttaatcgtttcccaggggatcagggagaagagtggacagtggtgatgccacgctgcagagggtcaaggttgcataccaattaaaatgacttccagacacttaacacacacatggtacttcgctacagaccgctgacatgttccagccaggaaggagaaaaaaaaaaacaacttctgatgtctcatgcctctgtcccccccttaaacagtgaggcagctgggctaacactgttgttgccaaacaactctaataatttcaggttccatgataatgagttggtggccttataactctcgtttgcatatcttggtacaagggaaaacattcagtccagtatgactctttaaatagccatctatgccaagccccacataaaaggtgggagggcttgttgatgttccctttttctgcaaactcatttgtgaaactacatcaattacagttcaatcagttctcccattcttttttcttctcattaaacttatgcctttctgcttagttaggagaggactgtaaactcagcttaagcaaaaataagaaaaataagaaggacttattcattctcatgaaacctatgcgtctaagggtaggagactgcctttttggtgtgcgtaaacctgtgcccctgagaaactctctgcttctcaaaactgctttcatctttgttggtttcctttttttttttttttttttttaataactttcattttaaactcaaggttacaaatgtactgtttttacataggtaaacctgtgtcatggggacttgttgtacagatgatttcatcatccagatggtaatcctagtacccattagttatttttcctgattgtctccctcctcccaccctccaccctacaataggccgcagtttgtgttgttcccctctgtgtgtccacgtgttctcatggtttaagtcccagttttaagtgagaacaaggaatatttgattttctgttcctgcgttagtttgctaagtgtaatggcctccacttccatccatgttcctgcaaaggacataatcttattctttcttatggctgcatagcattccatggtgcatatggaccacattttctttatccagtctatcattggtaggcatttaggttaaactgaaatcataacaaacagtctcttgcaccacagcataactaaattcaaaatcagtcagaattcactcaaaaccatacagttacatggaaattgaataacctgttcctagatgacttctgggtcaataatgaaattaaggcagaaatcaagaagttctttgaaactaatgagaacaaagataaaatataccagaatctctgagacgcagctaaggcagtgttaagagggaaatgtatagcactaaatgcccacatccaaaagttagaaagatctcaaggtaacaagttaacaacacaattaaaagaactggagaaacaagagcaaacaaatcccaaagctagcagaagacaggaaataaccaaaatcggagctgaactgaaagagatagacacgaaaaaccattcaaaagatcaatgaatccgggagctatttttttttaaacaacaacaataacaacaacaaaacaaacgattagctagatgaataaagaagaaaaggtagaagattcaagtaaacataatcagaaatgacaagggggaatattacccctgggcccacagaaatacaaacaaccatcacaagattatgaaaccctctctgcacataaactagaaactctgaaagaaatggataaattcctggacgcatagatcctccccagactgatttacaggaagaaatttgttttactttcaagcacgttctcatattgtcaccaaagctccacacttaaaatcccttgtattagtttgataggactgccttaacaaattaccacaaactggtggcttaaaacaacaaaattttattctctcacaatttgagaaggcagaagtctgaaatcaggatgtcagcagggttgattcctactagaggcttggaaggagaatctgatccttgcatctcttttagctccaggggactgccagcaatccttggcttatagccacatcatttcaatctctgcctctgttgtcacatggctgtattgtctgggtgtctctgtattttaaatctccctctcctttctcttataaaaacactagtcaggccgggcgcggtggctcacgcctgtattcccagcacattgggaggcctaggccggcggatcacaaggtcaggagatggagagtatcttggctaacacggtgaaaccccgtctgtactaaaaatacaaaaaaaaattagccaggtgtggtggcaggcgcctgtagtcccagctactcgggaggctgaggcaggagaatggcgtgaacccgggaggcggagcttgcagtgaaccaagattgcgccactgcgctccagcctgggtgacagagccagactctgtctcaaaacaaacaaacaacaacaacaacaacaaaacagtagtcattagtgtcaggctgtaccctaaatcaaaaatctcaagaggcttaattacatcggcaaagccccttttttccaaataaggtcacattctcaggtaccagggactaggaagtgggcatatcttttcgggggcacattgtaattgactacacatattactgtatcaaccccattgcaaacagagcaaaccccagaaatactgggctaatgctcgttagctctgatcacctggcctgactcacagatcaacctttaggctaatcactgcagctagaaggacatgtggcaaccccagataaagaacataccatttaaagaccacacacatcacacaaaacctattgagagacgcttgacgaacaaggtttgtgctcagtgtgttaagtggatgacatgatttaaaaaaaaagtaactgaagagctaagagagagttatggtggaagaagtcgttacacaaaggtgctacataattgctgctaggttcgtgttagccaaaggggcttacaccattttcaagcctttacaagacctgagagtgatgtgttggtttgagttggtgtttatgtggaaagggaatatgtatggaatattattaaatagttttactgaattattggcatattgtaggcattccttaagtactttattgaatgatagcacaaaatattgctgaatatttttgctacattcttggcaggttgtaggcatctcttaagtatagttctgcaccacataatgacgtttcagtcaacagcagactacatatatgactgtggtcctataagattataatggaattgccctatacagatgtataattttttatcttttatatttttatcgtaccttttctatgtatagatagatttagatacgtagtacttaccttttaatgacagttgcctacagtattcagtacagtaacaagctgtacaggcttgtagtctaggagcaataggctagaccatatagagtgtgtgtgtgtagtaggctacaccatctaggtttgtataactgcaccgtgtgatgttgtcacaaggatgaaatcacctaacgatgcatttcttagaatgtatcctgactcttaaagcaacatttgtggtttattgactgaagggataaaaaataaataaatgaatatatgaatacaaaacaatttttagaagataaatgaatgagtgagcaatttgtccttctctttcctcctgagattttctatttttaaaagtgtgcttgtatttttgtctttatatttaaataatgatttaaatgatttatttaatactgaagccactgatgagctgagaactcataacacattgctaggcacagagcaaatgtgaaatttagtttttgttgtttttatccacatgttgttctgccaagttgggcaacataatgccccctcagaatgctagttaatgcacttaattctctcagggtcttcttactttagactctttgacatccttgggcaattaaagattagctattttaatgaacacaccacatcttttacaaagcctctttggcaaaagacctttgtcagtccgccatcgacatatattgcaaattacctgctgtgtcccttgaagtattatggaaacgggaaacatatgggtggactggcacaggctctgcataccccattccagaagcttacattgtagtaaggcaatatcaaaacatgcatgcaaatgaattaggttagtcaatttgagattatctgggagggggctgcttttgtgcacaagacagagctaacctggaatttgaaaggtgcagttgggcttagctgtttcagtgacagtggggagcagagatgctgagaagggcctgagaaggacagtgaaacccaaatgacagctcaagtgttctgattgtcactttcatgcaacccctggtactgagtccatgctgcatattgttaggtgaaaattctttttttttttttattatactttaagttttagggtacatgtgcacaatgtgcaggttagttacatatgcatacgtttgccatgttggtgtgctgcactcattaactcgtcatttaacattaggtatatctcctaatgctatccctccccctgccccacaccccacaacaggccccggtgtctaatgttccccttcctgtgtccatgtgttctcatcgttcagttctcacctatgagtgagaacatgcggtgtttggttttttgtccttgcgatagtttgctgagaatgatggtttccagcttcatccatgtccctacaaaggatatgaactcatccttttttatggctgcatagtattctatggtgtatatgtgccacattttcttaatccagtctatcattgttggacatttgggttggttccaagtctttgctattgtgaatagtgccgcaataaacatgtgtgcatgtgtctttatagcagcatgatttataatcctttgggtatatacccagtagtgggattgctgggtcaaatggtatttctagttctagatccctgaggagtcgccacactgacttccacaatggttgaactagtttacagtccctgttaggtgaaaattctatggtccatttcacaactacgtaccacagaaaagggagatacggacaacactggaaaaacaaaatataagtatgcaaaggaacacagacttggatatgaggaaggggcataaatgctatatttaagcacatggttactgcctttcctaaggagtaagccaggaaaagaaactttgggtcagttaaatatctcgttgcttcctttgcaaaagtaccttttaatagtctgtttttagagttgtttaaaaagaaaaaactgtcccttgcctactttaaattcttgacatttttttctggttttggtgagatcagggtttttgcagggcagtatccttcattatatatgtcagaaggctgagaaatgagtggggatggtgaatcaaccacagcccttctgaatttctcacaaggtaatctacctaacagaacataccagtttccacccacctttgttttggttagagtgatattttgtcccttggcagtgaggacgtctttccttcacatgatttttgtaagactgtaccctaaaagtagccacagtgcagctgtgttttatatgaaaacaaatggggttttgttgggtacattttgtggcatttcttgaggtcaccagaaactcctagacgtcgttgtaaaacaaagaaagaagaagaaaaaggctggaaactcactcctcctgctgttcttatgtcaagtcagtgaaggcaattctttaattttttcattttttcagtgaatacttagcacataccatgtataaccccccatgtaagaccagccctttgtcttctaagaaatgacattctgggctggacgcggttgctcacgcctgtaatcccagcactttggtcgaggtcgaggcaggtggatcacttgaggtcaggagtttgagaccagcctggccaacatggtgaaaccccatctctactaaaaatacaaaaattagctgggtgtggtgtcgcaggcttataatcccagctgtttgggaggctgaggctagagaatctctttaacctgggaggcaaaagttgcagtgagtcaagatcgtgccattgcactccatcctcggccaccaaccctatctaaaaaaaaaaaaaaaaaaaaaaaaaaaaggtattctggtggatagtgggggagtggcacacccccaaaacaatttcacaaacaattatttaattgcagttgagttaagtgctaaagtgagaaggacacagaatagagtcgatttaaattagaaagaactaaaaaatgtagctaatttcttcattcctgtaactctgggtttgagacaacaacaatttgagtgaatcagtgaatgactgcatagatggcatgtataggtgtcaagtaaaaatcgtcttgtagctaaatcctcagttgtgaaatgggatacaaagtccaagctcctttccttttctaggtatttctgatgggattcactcagttcgttaaaactttaagaaagccctctctgtctgttatttttctctctgcctactcagatggttcctccattctaactatggtagaggccaaccttgtcatgattttcagaactatgtagttccccaccgcccccgccccaagaaatgcagagcaatctgccttatcagtatctcttccaattaatgtaatcttgtttctgttatttccaccatatttttcaatccagtgagcctcattacatttgcaagtgcattaaattagagcctctatagaaggagaatgatgattatcagctaatttaattatgtttctacatttgcagcatttaatgatgtctgccattgttgttggggattcttacattggctccaggtagaaattagctctgatcccatgtaaagtttacgttatcagataatacttgagagctcattgaggtacatgttcagtaatttttgaatctaatcaaaattgatttatgtgcaatcaaattataggaataaagaaacagcttcacctaatttagttgccgattatagtgttgcctgcctctgaagtcacaccaatatgcgtctcttagttttgtaccaacattgcatcaaggcctaaaattctgcaggtttttttttttttttttcccaaattgcatagttggttctgtatttctgaccttctgctgtccatcagattgaacatttatgccctctgattttgtgtcctgttcaacaaatgttgcccgggtgtcctttaagtgttggccatgtgactcttgcactagaggcccaggtcacccatgaacctagaagagaagatccatggtgtggaggagtgggtgttgcaggacctgggagctgaggctcgggagggctgattcatcattcttcctcctttgctgtggattctcaaccaaggcaaaaatagatacacacactcaacagggattaaggtacagaattcacgctgggcatggtggcttatgcctgtaatcccagcactttgggaggccgaggcaggcggatcacctgggatcaggagttcgagaccagcctggccaacatggtgaaaccctgtctctactaaaaatacagaaattagctaggtatggtggtgcgcacctgtaatcgcaggtactcaggaggctgaggcaggagaattgcttgaacccgggagacagaggttgcagtgagccaagattgcaccacagcaccccagcctggatgacagagtgagactccatcttaataaataaataaaataaaataaaatagaaataaaataaagtatagaattcagtttatcaccagtgaggctgtgttgtaaacatgcttttatgtttaacaagcactttagtcatagttattttgtgccagacacaaattggaaggaccttatacacaaaggccctttgaattgttatgatagcctaaatacaaactattattatcctccatgcacagtttatagacgaagaaactgaggcacagaaggctgggctatgttgccgaaggctacccatctgccttctgaaagaaccagggttctagtcctggcggtctggctctaaaatccatggccgctgaacacaaagtcctattgtgcctcccaaagctgaaattagcattctgtcatccaacccgcattactcctacaaccatatctagatcttgggatgggcagagtagtttggaggatattggtccagcacaggggaatgagatggggctttgaagctggcctctagaaggcggggccctgaaacgtccctacttaggtgtgcttacctgttctaggtataccttacctactctaggtgagcttaggacatacggatcaaaagcaaaacatgcactgcttggaggaagtgagacagagaaagagagatggagagaaagaaaaacttttccattttgaaaagttacccatcagaaaagtctctatgatgttgattgggtgaggaagaatattggaaacttgctccctgaaacagtcataacacagtggaggatttgagtaagtctctaggtctcaaaggaggaagcaggaaggatgagaagataagaactatgaacgctagactgagaatatactattaacgcctatacttaagaatataagatgttcttgagacatgtgataaagtaactttccagaaaaatgagcagcacactgtgaaaacaaagacgcaaaagtgaggtgtcagtcatcccccctctgaggccggagggagggtggagatttggtgcaggtcgaaactgaagccaattgataaaatgctgtgtgtgccctacaaggaagagagaaggtttgaataaaataaagtgtgtctcagtacaaaaggagaagtttcacaaagcatttagacatcttataaaatggagttgcttcatcactccctaaaggggccatcctcaactgtctcctgttcaaggcccactctcagcctcgctggatgtcaacagccataaccatgtgattgttactgcagcagagcaatgtctccaagtgtgcaaaggacatctctgggtcactgagcgtgaatgtccatgagcccagccaggctcccttctctgttcaggaggcaaagtttttccacttcgcagtccccaagatgtctctgtgatactggtatggcgttaccttctgcctcttcctgcttacgggtaccttggtcatctcaccagtctccctgggggttagcatcttaggaatgtgtactcaatgacagccaacgtaaattttgcaccttgctcaaaatttgactgctttcccgttaacggttcattaattgaaaactaccggtatcttcctaaacctagagtatgtcccaacagcaggatgtgattttatgttttgtggtacatggacatgcattttgttgtaattgcagatgtatatgtatgaggctggttttcaaatatagaaaatatgaaagaatcataatatactatatacccagcattaagatgttacaattcacatttttatcatatttgttttatctcttatatatccatcacttcatctaccaatccacctcattttgtttttttatgcatttcaaagtgacttgcatcagtatctttcacccttcagcagggtgtaaatctttaatgagagctcatggtttgtttgtggtcttttatttttctgaggtaaaatttattgatactgaaatatacaaaccttgaagggaccgtttgatgaggtttgacagctgagtacacttttgtaacacgaagctctgtgaagatatagaactgtcattcttccaaagtttaggtatgatctgtatgtttattagaaaaagaatcacagcctgaccagtatggtgaaaccccgtgtctactgaaaatacaaaaaattagccaggtgtggtggcatgcgtctgtagtcccagctactagggaggctgagacaggagaattgcttgaacccaggctgcggaggttacagtgagccgagattgcaccactgcactgcagcctgggtgacagagtaagactccatctcaaaaaagaaaaagaatcagcatacatactaaacctatgattccatgaacagtttaaatgaaagagtacatacttttgtgtgtgtatatgtgtacctggttacatatatgtgtgtataatttacattgataagaataatgcagtatgcagatgtagcagaatttgtaattgtgatggaagttcttctgtatttggcaattacaggcctagggaaaaggtaacctcatcccattagcattgtcttcaaaaagaacacgagcatataaaatgtgcgaggctacactgatgtaacgtccaagataaatggaaagaaacacagtgttgctcgtttaattgaggatgtttaacgacttttggccctgagagtaccaacagctacaatttttcaaagtcagccttgatttatgttttattttttaagtactcattaatgtcacaaatagttaagttgggatcagctgtcttcatttacaaaaaatgggttatactttcatcttttgaccctgaaacgtgtagataaaaatcaacattaattggcaggatgaatgagggtggttagggtgggtgtctggctgcaagattcttagagtattgggagagatgctcagagccccttaactggagatgacaacgagattttaattaacagcaggtgagtcttgtggtcagccatttgacatataggtggatcacaaaatagcctttcctttctaaccacatttatttctagcttaattagtccttctgagatagcttcgctattagccacagcctctccatttaagatccttttaatcagacgttttatttttttattttttattcttctcattttagcactagcttaatgttatgaaggacctggactaactcattttaatgacctctgctacataaatgctaattttacatttggccttatttcggtaggttttttttttttttaaaaaaaaaaaagaccattgctttcagaaggagaaaaatggaaagattaaaccccttagtgtcatctgcctgaaaaatcctgtggtttcttctgacaggaagagggttttcaaatccctccttggtctaagcttctgtgcttgacatctcattattttactcagctacttcagcatcaccttcacccagttaattaagtaactcattgaatgtattattcagttttgattcccctgtctgtgacagagagggatggaagatgcttcttcatccttcttctcctgcctttttctcttctgcccacacccaaggaatggaaaagagaaaggagaggagagaagacattaatttcaaaatccatccatccatccatgcatccatccatttctgcagcagattgtttgatgtttttaatgatactcaaaagaaagtgaagttgatgatggtaaggttaatggtcataggtcttaatggtgatataacatcagtttgcaccaggcactgttaaaatttccttctaacatggtcttatttcgtacttaaaacagcctgatgaggtaagcactattcataaggccactttacaggttaagaaagctaagatctagtcaactaatttgttcaagtctccttgctagtaggaatcagaaacccaatttgggcccagaactagctgattggtaatacttatattccctacagcatttctgttaagtatctccatgtttgtagtcaagtttaaattcctaaaatttaagctggaatttatgatgaaaataccatgagaaggaggttgaaattgtagttgacctatgttacccgacctgctcgttacaggagttaagaaagaaacttgacttcctctagggcagtagtcctcaaaccccaaggaccaggacatttggccaaacagctatgataaatgctgctttatttgagtacattagacttcaattaaaaaaatgttttaaagtaccttattgaatgcatttagatttgggggagggaaggaggctatacttggacctaactccttggttgtcaacccagctggaaataagcaagacatgatgtttaatatgaatgaaagtagagagagagggcatttggaggggggttggtgcagagggaagcagaaagaattactaacatgaaaaggcagatagaaaatttagaaggtcaaaggcagagtaattgaaatagagcctcggaaattgtgaatctgagaaagaactggaggttaagtgataggtaagaaggaagataaggacaagtaaagggatggaataaaaccaaaaatggggggtgagtgtgtgtgtgtgtacgagagacagagatgcattttaatgcatatttaagaaaaaggaaagtagaaccttataaagaagatgaagtagaaatattttttagaaaacactttttattatgaaacatatttttttttttgtaagggaaagttcccagtgacagagtgagctgtgtagcaacgtgtgtaaaaagcagacatcacattcttaaagttactccattcgctcctgaacaaatattaagtggaggttttgttctgggtgtcagaatacagcatggaaaaaagacaaaggaaagtctctgctttcatggagctaagaagctagttgatgtggagatagaaaaataaacaaggaaatcaaggttatcaatgcaaataatggtacgtgcaataaagaaaacagaacagagaggataaagcattgctggctgggggaagagctcactgatgagctggtgtctgaactgaccttggggtagggaggaggagcagccaccgggaggctcagagcagcagctctgcagggggcgggggtagagcgggtgcatgcaaacaccccaaggtggccacaaacttaatgcatttgagaagctgtaagaaggtcattgtagccaaagaggagtgagcaggaaaaggtaggagaggtcagtagcgaaatgggcaaagagctatgttgggagctgggtttattctcaatggaaggagaggccattagggtttcaaatagagaaatcacactctatttggataatgtttggataatgtttggacaatgtttagtaaggatgtgctggaaggaggtgctgggtttggtttctgagtctgtcccttgttaattgtgtgtcctggacacagttactgcatctctgtgatccttcacttcctcctccttgaagacacttaactgcatcgggtttctttagaaggaaagctggaagaactttagagtctgttttccctgcatgctagctacaaactgaaaccatcgcaaacaacaaggtcaaaacatctgtgaaaccttgcaccagttgtaataaagatagccagggagaaagaaaaaaaaaaaaggtctgaacttgttggagaaacaaaaggacctcataaacagtatggagaccagttgtgtgttgtcatcagtgacttacctgagaatgatattcctgtggttatgaggatagtgttacagtatttccttggctaagtgtctgtggctgttatccatgtgcagaataaaagtccacttgaggaggagacagaggctcctgtcttttaccaatgttgatggatttcagtggaacaaaaatgagtctcttgaggttagaaggcaggcctggccatgggtgttttgcttgagctattccactcatgacactgggcctgactgatatccggcgaaggccttctttggctgaagtgcttgccaggcctaaccaacctggaatttattgataaagcttaagcagccgcaaggcctatgacctcaaagagtgacttaggctgactttatcagccttggctcttcttttcattatatttgctattactggagctgctctcttttcttaaaacctgttaaccttatacaaggggatgggaccatttgagctctcagacaggatgctgatgggaaattgtaagccttcgaaataggttgagagcttcctgttgtttgggttctggcagaggttacaaaaataaataaataaatataaaaaggagagggatggggagacattgaaaaataaatacttgatgtgttttcctggagttgagctggcttcttcctgggacatgcttttttccagcccttggaagaaagttgcagcgattgtgcccacttcacagatgcagctgacgtgcacccctgtgctgcgtggggatcttagcagggcaggtcagatgtccagaactacttacatcctcacatcagtggcttatagaccaagaaacagtcctctccaataggtgcacagaaagtgttcttgagtctttatttttattttattttttttgagacagagtgtcactcttgtcgcccaggctggaatgcagcggcacgatcttggctcactgcaacctcctcctcccaggttcaagtgattcttgtgcctcagcctcccaagtagctgggactacaggcatgcactaccacacctggctgatttttgcatttattattattattttttttagtagagatgggttttcaccatgttgagccggctgatcttgaatacctggcctcaagtgatccccccacctgggcctcccaatgtgctgggattacaggcctgagacactgcgcctggccacatgttctggagtctttaaatcaacagactgtttaacttggctaaaggaagtcaagtagttacttggtttccagccagttactgatggctgtaattagccacatgttttagtgactttggaatcgaggctctagccaggcgctgtagctcatgcctgtaatccttaggctttgggaggctgaggcaggaagatcacttgagttgaggagtttgagactagcctgggcaacacggaaagatgtatctctataaaaaaataaaaataaattagccatgcatggtggtgcatgcctgtagtcctagcgactcaggaggctgaggtaggtgggaggattgcttgaggccagggggtggaggctaccataagcgatgaccgcactactgctgtccagactggacaacatgagtaagaccccatctcaaagaaatccaggctttgtgtaaaccgatgcatttcttattgaataaacctacacacacacatacacacacacatacacatacacatacacacagactatatctatattctactataccagttattgtgagtaattcatggaggttcagaatgggtagaaaagtcaataaacagtaaagttgccttctgttgtgtgctcattcactcttccattaaaaaatatttctgttactcctttaagaaaatgattagtgcaacaggaaagcagattggctgagtccctcagatcacccgcttctgagtcaaaccaataaggttcatgtcccagatccaacaactgtcagctctgtgaccttgggcaaaaaaccaaacctccgtgagtatgtttactctaaaatagggataatcactgtggctgcctcccgggcttagtgaagttgcatatatatttaatataatagatgatacatacttatataatattatatccatttaatagaatatatgatatatacttttatattttttaatttaaatataaaagtatattacatatttaaagtattcaaatatataatattaatctatgtaatatatgattaaagtattatataaatggaaattacattatataatacaaatatatgtatatatgtaaatatgtacatatataatacaaagatacatatttgtattaaatatataatacaaagatatatttgtattaaatatacaaagatatacatatatttgtactaaatatataatacaaagatatacatatatttgtattatatataatacaaagatatacatatatttgtattatatataatactttaaatttaaattcaaaatatatattataaattaaaaatacacatgtatatattttaatttatataatataatataatttaaattagtaatttagtttataattattacatatattatacatgttttaatttatatataatgtaatataatactttattatgttacacaaattatatatgacatgcatattttaatagtttaaatatatgttatatattttaatttatatatcatatatattatatataaagtattatatgtaagtatacattatgtattatattaaatgtatatgatatgagtataatatattacgaaagttttaatatatattacataatatgtacatatttttaatttaaaatatataatactttcaatttatatattcatcactaaaaatgattttttggaacattagttcttgttgttaaccttgtctctgagtagctgataacttcatgaaaaagtcagatattgtataaaatgccctgtaaatataagtacaagtgaaatcatttccaccatagcccatgatccttatccatgcaggaccaaagacttggtgccacaaggaacagtcaaatctggatggggaggtagaggaggaagtgataacaggtttggtaaacagataattgggcgaacagagggaaagtgattcagcaggaggagacagtgagccaagtttctggaaaataaaaagaggtatcaataaaaaggttgacagggagcatagggtctgggaggaacatactagaatatgagtctaggaaggaaggtggcataggcacagaagtaatttcagtaaatccaatgagtcttacggttttgtgaattcaaaattatttttggaaaatcatgctgcctaagagagatcaatttatttttatttattttacccaacataaactattttgatgcacttgaccagtcagtcttagggtttaggtcactatcatattcacctgaataagtatagtctgactattccttttattcaaaatgttcgagaccagaggtattttggatttcagatttctttttcagattttggaatattgacacatacataatgaggtatcttggggatgggacccaagttgagaaccgtcattgccttatgctttatatgcacatcatacacataacctgaaagtacttgtgtacatgtttaataatttatgcttgaaacagttttgagtgtattttgactgcagtccatcatatggaggtcgggtattgaattttccacttgtggcatcacctcgcatctcagcagtcagacagttttggatttgggggcacttggatttgggattttttcttttttgagatggagtctcgctctgtcgcccaggctggagtgcagaggcacgatctcggctcactgcaagctctgcctcccgggttcatgccattctcctgcctcagcctcccgagtagctgggactagaggcgcctgccaccacacacggctaattttttgtattttcagtagagatggggtttcatggtgttagccaggatggtctcgatctcctgacttcgtgatcagcccggctcggcctcccaaagtgctgggattacaggcgtgagccaccgcacccggctggattttggatttttagattgggagtgctcaacctttaataacaatattaaaaaattattaaacctctaattactgtagcacatatcagaagatttctcttttatttggtttaagttattttggagaaataaaaattgtattttttgtgtgcatgatcttttgaaatgtgtaaacattgcgaaatgcctcaaccgagctacatcacataaacatttatattctatttgattgtgtgaatctcaccaatctggaagtcataaaataagccaattatatataatatagtttatatatataatatataatatatataatatataatatatgttatatataatatataatatataatatatgttatatataatatataatatatataatatataatatatattatatgtttaatatatttatatgtttaaatatatgtataaacatatatgtataaattatgtataaatatacataaaatatacataaaatatgtatattatgtatatttatgtatatgtatcattatgtataaaatatgtataaatatgtgtataaacatttatatggataaattatgtataaacatatttatatgtataaatatgtttaatatatataatacatattaaatatatatattatataatatataaatttatattatatattaaatatataatatacaatatatattatatattatatatattatataatatacaatatatattatatattatatatattatataatatacaatatatattatatattatatatattatataatatacaaatatatattatatattatatataatatataatatacaaatatatattatatattatatatattatataatatacaaatatatattatatattaaatatatataatatataatatacaaatatatattatatattaaatatatatattatataatatataaatatattatataaatatatgtaaatgtatataatatgtattatatattatatataatatcctatatattatatataatattctatatagtatatataatattctgtatagtatatacaatctgcatagtatatataatattctatatagtatatatataatagtctatatatatattagaatgtgcatttaacttgaaaaggttgaaactctaaagtactccccagataactggtggtgaattgggagccagatgatgaagtggcagcagaaagtacagctgaccatgagtacagggtctagaagaatattgtaatacatctacatctcttcaagaacacaacaagttggcgttatttagcaggagggcaggatattccatggtctccaaatcttggaggtcctttctgcactggattacaattctgaaactcatcatccatatttagaaaagtggagacagtgaattacattttacagggattttacccaaaaatggttaaaatgacaaagtctctgtgcttcagtatattagccttcataattttcaacacccaacatttagttttttatctcattcccaggatgacatgtttgactgaagtatctaagacacctttaggggtagactaaacttctgccactctctcccaacaaaatatctgtgtcatatgaatgttgtaggcctgccattgtaaaagagaaagtaatcaagactttaatgggattatttttaattgtcttcttgcatataaaaatgaaatgacaggttctgaaaggaaacttggcatttgggaaagagggtggaaaaaccagacaaatgtaattatcctaaactgttttaaggtacatttttcctatgctcatgtaagaattaaaattagtgttttaaagaataagttactggtaaatcgcatggcaaaagaacatacatgttcattttttcttccttatttcaattttctgagaaaatttaagtagttatttctcaggtgagttttaaaattcatccttagagattggaaactcaagggccacgcattgagacttacacatttattataataaaatatgcttctggcatattaacttttactaccatgttgtcaaacttagaaatattgcagtggaagcaaaaccaagaaaatggctatcggtatgttctttgatgaatgaaggtgtgtacacatagattgaacaaattttttacactaatttatataatgtttagccctttaatgccaaatattacacatttaatgttgtcttattacgagcactcattccggagtacaaaaaattgagaggaaaaacaaaagagacttctcttcgctattgtaactccatgctggtttggttggtgcaggtgtttgggtgatggccaccattttggtcttgtcagttacttaaggctgtagacaataaaggttgcattcctgaaataaagagttggttctctaatcttgtggaaagaaccagtattcattttctaccaggaagcaaaatgccaaggtcacagggacagaaaatattgcttcccaagaaactgtggttgacaagatggctcgagttcaagtgaatcctgaaagtatcagtttccaaggagacctgtggccccacccagccacctacaaagcttagccatcgtttcactcagagcagcagccatttcttgcaaactggcagctcatttctggatactcaataggatgcataagaatgataaatttttttcaaatcatgtgcgctagctctgttgaccttcagctgtgctgcgccttctttaattggcataaatcttggactgcccattggatgtctttctggaatctgatgtctttctgtctatctgattcctaagaggaagtgaaatattcaattaaatagtttcgttgagtccttgtagtgctaggatctttacaagagcggtttagtaggtgttgagatagactatctatcagcttcccttcccaggagaacgtgtcctgttagaaattgcatcttttgtggccagtaggggtctgtttaattgactgaaatagtaatgacccggaggaattaagacagtttttagaaacatcttatattgagaaggaagaacaataactatgataaaattatacaaatacacaataataataaatacacataatttaaagattacaattgtgggccgggcacggtggctcacgcctgtaatcccagcactttgggaggccgaggcgggcggatcacgacgtcaggagattgagaccatcctggctaacatgatgaaaccctgtctctactaaaaatacaaaaccaaattagttggtcaaggtgttgggcgcctgtagtcccagctactcgggaggctgaggcaggagaatggtgtgaacctgggaggcagagcttgcagtgagctgagatcacgccactgcactccagcctgagcaacagagtgagactgtgtctcaaaaacaaaaaacaaaaaacaaaaccaaaaaaacaagattacagttatgacaggtattttgacccctaactatgtgtcagcactctgtatagcttatctcagtactaacactaacacccatatgatgataccagagcttttaaccccattttctgaaatacagaaactaaagaacagataagttgctgcgaaaagccatataaatattaagtggtagagtcaggattttaaacagggtacactggtttctttcttaatgtattttgatccacatctacaggtgaaattcaaatgcagcttattgaattttctctcaaatattatggtgaattattttattatcttagtgtttcagatacgccttttgccacatttcctcaagaagttgatatactattaagaactaggctatatttttaattttttgttaatttaaatccttcatagaggccgggcatagtggctcacatctgtaatcccagaacttggggaggccgaggtgggcggatcactggaggccaggagtgtgagaccagcctggccaacatggtcaaaccccatgtctgctaaaaatgcagaaattagccaggcatagagcaggcacctgtaatcccaggtacttgggaggctgaggcaggagaatagcgtgaacccgggaagcggagattgcagtgagctgtgatcatgccactgcactccagcctcagcgacagagtaagactccattgccaaataaataaataaataaataaataaatactactttatagagccagtgtgggaagtaggtacattggggtatatcacatataggaaacactgggcaaatacttgtgaccctctagaaaggaataaaaaaactccttctgaaggatacaagttccagttctggtttttccttcagttggccttgaaccagaatacgttctctgggcctctctgactagtccctgtcatgttctagccccatcttaggattaaggccaagacccaaaacaagcaacatgaacatcagaacagcaccagaaaccccaggtaggcttcgcagatgaaaataatgactgtggcagccatgctactcaaatggaaggcctgctttctttttagaaggaacctaattggcaagtaagttgctatctgacttgatgggcgtaaactcaccgttctgcatcccactttcccgatcttcacttcagttgcttaaatggagtgcactaaacctcaatttgataattgcatcctcaaaacctttaatgaaggtgcctatcaaagtgtaaataattaccccgtaatcttgtatttgcaaactgcatcttggctgtttacgcttcaccgaggttcaaatcagaggttcagggcttccccagccctcacattcctgttgacgtcagaggaatttcaaggacctagaggacagcattgtaacacggttcaaccaaggcgttcaccttcactccctcccaacgctgacatctgtcattttctggtgctatttataaatccaagggagcattgctgttttgttttggtgctggtgatgcagacactcatcctcattagaatttttgccctgacgccgggcacggtggcccacacctgtaatcccagcactttgggaggccgaggcgggcagatcgcttgagcccaggagtttaagacaagaccaggcaacaaagtgaaaccccgtctctactagaaatacaaaagttagctgggtgtgatggtgggtgcctgtaatcccagctactcaagaggctgagacgggagaatcacttgaacctgggaggcggaggttgcagtgagctgagatggcaccaccgcaattcagcctgggtgacagagcaggactccgtctcaaaaaaaaaaaaaaaaaaaaaaaaaaaaaaaaaaaaaaaaaaaataggttctgccctgagcctttcaggcctggccttgttgctctgggacttgctccctcctcgctaacgtgtttccttctttggagattacccactttagctcacctggggaacacacacaccactgacccagttagggcttcttccagcctcttctcttttttccattcttttgactgcgttaattattcacaggaacccgtcaatgaaagcaccagggattatccaggaggctgaccaccaaattagaacaagaaaatacttgaaacagtttgcatgctgtctgagggtgcagctacggagagggtatgttttaggtgctggggtctgagagaaatgaaaagagacgccaagccaggtgactgacagaaggcaggcgacaaacccaggcttcccaggctcgtactttctcttcggtgctgtatttttcagcacacaaacttgctgagagtttgcagctgacatctcgagaagtattcttcttaaaagctgagcgaaaattattcacctcatgtgaaaacaagtgcgatttacatctaatgtgggtaattacttttacagttaattaaaagcgctctcattaaactcccgctgtgatgccaatgcatagctcttatttgcaaacagacctttggtttgagctcacctggtgacaggagactcctacctgaaacagggatgccgttctcggtactatgtttaattgtgctgagccagcaaccctcgagttacccggccttttaccccacgccagctctgcttgtctgcatggctagattttgagatatggaagcctcttgtcctctcataaccacactccaaaaaaaaagtaaggtgaagaaaacaaaataactcacaggaggtagggatgccaaagaaaggtaggggactcaaagaaagaagtcaagatgaaaagcctgctgtctttatttgcataatagtttggttggggatcgttttgtagttgttctggctttacagctttttcctgcctaagaagatatttactgtcagagaaaatatccccttaggccccctgaagattcctccaaatgtttataaagtcagcagctctgccctgcaacctacccaactaaggtaaactttactcccttggttgaagtgatttgtgttgagattttacttagtttacatgcgttgtttgctgtttgtatgatttcaggtgaaatagctcttacatcgtgagtcatcttcatatttaggttgaaaccatagacttttcggaatattctttgccctgaagcatctctgccacgctgaaccttcttaaacacatattaatgaaatgtctcctcaaatgatcacattcctagtaagtaattagggcttagtaattaaaacatgcagtcatttgagacttaaattttgaaggcacagaaagattgagaaatttaaaaagtttacggacctgatgaattggatactcttgcataggacttggtgctttcggtattttttgcaaagttatttgctcccatctgctggccatttgtgatattgcaggtgctgagctaatttgtgaatggaaaaggaagtgaataaaatctatcactgcaaacattttatactattcttcatgtattcaagtaaactgatttgaatcttggtttttgtttgtttgttagttttgttttgttttgttttgtttttgcggttggaggattaagtgaacacagactctgaagaattctgctgaaaggcaagcatgatttgaaatttttaccaacatcagagttactcaagttttgaaagccagaacaccctcgttatctttaataaagcaattaactttagaacattggtttaaatattcaaattcaagcacagtatattgtgtaagggagagtataaaatacatagctcgtagaccagatggatttcaatctcccttatgcttttaatcatcggagtggtaggaagccaattccctacactctaaaactcagttttttcacctgtaaaatggaaacactgggcaaaagggtccctaaggcttgaacttattctcaaaatctgagtctttgtgaaggttaaaaaatcatataaggctgagcacgctgggtcatgcctgtaatcccagcactttcggaggccaaggtaggtggatcacctgaggtcaggagtttgagaccagcctggccaacatggggaaaccccatctgtactaaaaataaaaaaaatagccagacgtggtagcatgcacctgtaatcccagctactaggtaggctgaggcaggagaatcgtttgaacccgggaggcagagtttgcagtgagccaagatcaccctactgcactccaacctgggcaacagagcgagactccatctcaataataatagtgtaggttgcataaaatcaccagtatgctcttagtcttagcatctaaactcatattcagtgacttgtcttaaattagaagccgttgttattttcacaacaataggcaatgtaagcatgcatccaaactatcagaaagcttgcctttgcaaaggagaccatctgtaatgttgagtcaagatttaaaatgcaccttgaatgctttttggagtgtgatgtcaaaaatgtatcttgtgttaatattataaaccgttctgctataacatttatttgctgtttaagaaggaagagcaaaaccttcttcctcagcagtaatcaatttctcagttgatcataagccgatttgggcttgtcagatgaacctttgactgtgtctcctcacactcctgagaggtggcttaagctgtcctgtatttcctatgaaaagctctctgggactttgtatttgagtccaggagaacaatgctgtgcccaggatatgtgatccttacttagcttctcatgacaagtctaagcatcctggtcttttctttccattgctcttccagagtgaatgactgcaataatcaatttagaggttttcaggggctgtattgtggaaacacctgggccctggagcacagcagcctgtgattgccctgggattccttttaaggaatttttcttgtcccctagagcttagactaagcggaggtggcctctggaccacagttatcttttttcagtattaagtagccaagcatcctgcaagagagatcagcacaaagagctccttgatcctctgtatttattttctatgacttccgtagcaaatcatcacaatctaggtgcttaaaacaactgaaatatattctctgacagctctggaggctctacgtccaagttgaaagtgtgagcaggacggctctcccagcaaaggttctggggaagattcatctttgcctcttccagtgtctggtagcttagtgtcacatgacttgtagcagcatctctctaatccccacctgtcttcacatggctttctcttctgtctcttaaaaggatacttgttactggatttagaacccacccagataatacagaattttctcatttcaagacccttaattatgtctgcacagactccatttgcaaacaaggtcacattcacaggcactagggactagtcggcttgagcatatcttttggggggctgctgttgaaccccgtgctggctactcacttctaaatcctctgaggtctcgggagcttcgttgtccggtgtttctctccacattttctcgggaatctttaagtgccagatacttcagagctgggaatgctgctggtaagggatccgggatgctggcatccttgcattgtgggcatgaataaccctgacctacaaaaattatcaaaaacaaccaacacaccaagtgtagaagaaaagaagtctctctcgggagagagaactgcttctgaaaagaacggacacatgagtgctttgatgtctaaaatctcaaagaacctagaggccttggaagagaaaactttaaaaatagacatgtttttaagttctcaatgcttcaatcagaaccaggtttcacaaagcctgttggaagatgtcatcaaggacagctgacatttactgataacttgccatatgctaagaccctggcgtgtattggatatgcctagccacaaacgaggcaaccatgattgttaatatgcttctcttacaaatagggaaagtgaggctaagcaaactcggcctccttgtgcagagttccaaaactggtgtggttgagtccggtaggataaaccctagcagtgtgattctgctatctgtgtggaatcccatctgtcgccagcaagtgagcctccgctgttcagggtttcccggctacaaaaagtagaagggctgccttctgtcgggaaattgattgcttggtgatgagtccacagctcaaaattcatacttaacacttttaagtagttgagctgttttccaagcgaagtggtcgagtggggctgaagtacttacttgacgagtctggttcagaaaaggtcaggtcggaacccacccagagacaccggctctaggcagcgtgatccgaacaataatttgttctcgccaaagtgacatttttccaatttgagtccagcattgttcagaagcaaatgcagtcccctggggcgcctcccgcatagatctgcagcagatgacaaactaacaatatcatctaaataaaaaatccagcatgggtttagtaaattaatcctgacaagaataaattgaataatcttagggaaatggcgagagctctgattctgccagatcgctcttttctgtcgcttgcgtgggtcctcggtggcagattaagagcaaaaatctgcctttggtttattgatttcgttagttcgttgattaacacctgccacttctgtgtgggtaaatcataatcggatatggactcttcctggcaaacttaacatattttcactcaaggagagaaaggaaatgcttatttcacctggtcagaacgggcaaaagcagacagagagctgcttttcctcacctcgtttctcagtggtattttctaggtttaaaagtaatctgtgattttcatcactcccatattgagttaatctcccgtttctgtttaggttgcttagcagacaaattcaaggagagtttttagtaagagtgaggggtgtttttcctgactcagtgtccgaagtcaagcagagacttcagccattaatttaggagacagggtgagaaaaggaagataccgcgtgtacacatgatcccacgtcctaggactgggccttacaggtcgtctgggaaccttgtcttagtcagcctgggctaccctaacaaactgccatagactggatagcttctgaacagaacatttactttgtcatagttcttgtgtctggatattcaagatcaaggtgccagcagtgtcaggttctgatgagcaccctcttcctggcttgtagtcagtcattctcactgggtcctcatttggacattcctgggcttacgctaccagagagagagagagagagaaaatgagtgagctctctggtgtctcttcttaaaaggatactaattctttctttattttattttatttttgagatggaatcttggtctgttgcccaggctctagtgcagtgacgtgatctcagggctcgctgcaacttccgcctcctgggttgaaatgattctcctgcctcagcctccaagtagctgggattatagatgcccaccaccatgcctggctaatttttctattatattgaaatccaatggggtttcaccttgttggccacgttggtcttgagcccctgccctcaagtgatatacctgccttagactcccaaagtgatgggattataggcgtgagccaccacacccagccaagggcagtcattcttaggacctcatttaaccttaatcacttccttagagttcccatctccaaatacagccacactgagggttagagctatgacatatgaattttaggggggacacatacattcagtccatcatactacgtgttaaaaatgttgattctgattcgatgtatctgggatgaggtgtgatgtgttgcatttttttttaaagatgggatcttgctctgtcactaggttggaatgcagtggtacaatcttagctcactgtagccttgactgcctagggataagtgatccccttctctttgttttgaaacagagtcttgttctttgttgcccagtctggagtgtagtggtgcaatctcggcttactgcaacatcagtctacagggtttaagtgattctcgtgcgtcagcctctctagtagctggaattacacgtgtgtgccaccatgcccagctaatttttgtatttttagtagagacaggggtttcattttcttgcccagacaggtctcaaactcctggcctcaagtgatccacctgccttggcctcccaaagtgctgggattacaggcatgagccactgcacccggcttcaagtgatccttccatttcagcttcccaagaagctgggaccacaggtgcataccaccccacctagctaatttttttcttctttattattattttttttgtagagacactgtctccctaaggtttccaggctggtcttcaactcctggactcaaacgatcctctggactcggcctcccaaagtgctgggattataggcatgatgcattttaactggctcccaggggcatcgtacttgctggggttgcagactccacgttgactaggaagttcctcatactccccttatgtgcggatgagggaaatttgctgaaggaccgcatggttattaaatagtaacaccctgctttaagagtctagtgccgtgagtctaatgccaggagtctaatgccagaactggaattacccgcagccctgtcctcccacccttcagccttcagtccactgccacatcccctggagggcttggtagcatgcatcgacgggccctcaccctttgaattttggattcagtaactgagggctcttccgtgcaaacctcatatttttcacttcaggagagaaaggaaatgcatcacctggtcagaacaggcagaagcagacagagagctgctttttctcacctcatttctcaatggcattttctacagaaaatacagcctgagaatctgggtatttttctttgcttatttatgtaaactgacaaaagttatatatatttatcatgtacaacatgatgtttggaatgtgtgtacattgtggaatggctaaatagagccaatatcatatacattacctcacaacgtcatttttttgtggttagaacacataacatctactttcttagcaattttcaagattacaacatgttgtgaactgtagtcaccatgttgtataatattttaacttattcctcctgtctcactgaaattttatgtctttaggcccagatctccccagcaaaccccctggtagtgagggtagtccctgccagcccttggtaaccaccattgtactttttagtatattttttgtatttgtttcatgcagtatttgtctttctgtaactagctcattcaacttaacacagtgttctccaggttcatccatgtcatcacagtgacaggctttccttctttattaaggctgaaatggtattctgttgtgtatatataccacatttgctttatgtggttcttccttgatggacacttagttttttgctttttgttttatttcagtaggtttctggggaacaggtggtgtttgattacatgaacaagttcttcagtggtggtttctgagattttaatgcacccatcacccaagcagtgtacaccgtacccaacgtgtaatcttttatccctcaccactccccgacactttcccctgagtccgcaaagtccactgtaccattcttatgcctttgcttcctcatcgcttagctcccacttatgaatgagaacatgcaatgtttcgttttccattcgtgacttgtttcacttagaataatggtctccagttccatccaggttgctgtgaatgccattatttcattcatttttatggctcagtagtattccattatatatgttggggaagtattttattacatatgtatatataagatgtagtattccattttatatatgtaagtatatgcatgtatattgggtaagttttctgttatatatgtatagtatattatatattgtattcatctatgtatagtattccaatataccacactttcttttatctacttgtggattggtgggcctttgggctggttccatatttttgccactgtgaattgtgctgctataaaagtggggtattcagtttgattccctatcttggctattgtgaataatgctgcagtgaagaaggaagtgcagagatctctttgacatacggatttcatttcctttgagtgaatatgcagtagtcggattgctggatcatacagtagatctgtttttaattttttgagaagcctccacaccgttttttgtaataactgtaagaatatgcctttttaacagcagctgatgctgctggttggagagtctcactttgagaagcacatgtaccttgcttctccaggtttttttgtttggttgcttggttttatttttatttatttttttctttttttgctgtgaataaccccttcttcccatagcaaggaaaagaatgaaacctgtggataaattatgtggactgaccaaaccaccttgaggaaaataaaattacctggaggaaagggaaagcacctgatgagggatcacttctggttacagatttaagctccctcattgtgtgattcagtatgagttacctaatggctaatcacaattatcatgccacagagtaactaaggaatacccactttgtcgaatgttggtaatttagagacagtacgaaaaacaccaagcacagttcctggcacgaaagaggtatttaatcattgctcaccggttcagtcccacttgactgataggaaaacagtctgttctacataaaacaagatatttgctatacgagtcttcaccttatgatattgtctctttttgttccactctggattcaaagggacctagaatttgctgtgtttactaataaatcaccagcttctcatattaacctttcctaatgatgcatccgcagagaaaaccccactgcctcttggtgagaaaatcaacatttctgtagacttaaccacaatggagtccctaatgttttttggttgtttaattgattggttggttgttttttggaaacagagtctcacttcgttgcccaggctgaagtgcaatggcatgatcccggcttactgcatcctccgccttcccggttcaagtgattctcttgtctcagcctcctgagtagctgggattacaggcgtgcaccaacaagcccagctaattctgtatgtttagtggagatggagtttcaccatattagccaggctgatctcaaacacctgacctcaggtgatccacccgcctcagtctcccagagtgctgggattgcaggcgtgagccaccacacccggcctggaacccctaatgtttgtaactccctacacaaccctgcacatccatgccctccctgcctccatggagagcatggccaggctacagaccgtgcaacggccccaggtcgccatctttctctcccaagctgtatcctttctttaaagacgtcccattgattttatctggcctctgactacttctctccccttcccctgctacacccttatccatccaccatcatgtcacacctggactcctgtggtagcccccaaatttttctccctacttaaatttgtaacccctgactgccggttctgttaaaatagaagtcagatcatgcctgtcctctcttcattatgcctgagtgaaacccacaagtgcccatgaggatgtggacagattggaacacttgtgcactgttagtggggatgtaaaatggtgcacctgctgtggaaaacggtagggtggttcctcaaaaaatgaaacattgaattaccatagggtttggcaatctcacttctgggcatacgcacaaaagacttgaaagcagggagttgaatagatacgtacacacccgtgttcatagcagcatcattcacaatagccgaaaggtggaaacagcccaaatatctatccacagatggcgcttatgaatggataaaccaaatgtggtctctccatacaatgcaatgttattcatccttaataagaatgaaattctaacacatgctaccacatggatgaaccttgaagacattatgctaagtgaaataagccaggcacagaaggacaaatgttgtatgattccacttaagcaagtgttaagtcctcaattgtataactgtaaaattcatatactgaagtcgtaacttccaatgtgattgtgttttggagattagtcctttagggaggtaattcaggttaagtgatgtcataagggtggggtcttaatccaataggattggtggccttaaaagaaagatggccacaccttacggtggctcacacctgtaatcccagcactttgggagggcgaggcgggcagatcactaggtcaagagatcgagagcatcctggccaatatggtgaaatcccatctctactaaaaatacaaaattagttgggggttgtggtgcatgtcggtagtcccagctactcgggaggctgaggcagaagaatcacttgaacctgggaggtggaggttgcagtgagccaagatctcgccactgcactccagtctggcgacagagctagactccatctcaggaaagaaaaaaaaaagccatgggtctgtctccctttctctctctctcagaaagtatagagcagcagctatgtgaggcaccatgagaaggaggcatctacaagccaggaagagggacctcaccaggaaccctgagagagccttgaccttgaacttccacctgtagaactctaagaaaataaacttcagtcgttgaagtcacctagtctgtaatattttttatggcattcctagccgactcatacaatgagaggagtctagagtagcaaaatccacagagacagaaagcagaaggtggttttcaggggctctgggaggggaagtgaagagttattgtttaatgggtacaggtggaaaaatgaaaaaattctggagatggagggtggtgatggttgcacaacagtttgtatgggtaatgccccagaactgtgcacctaccatggtaaaattgttaatgatattgtattttatcacaataaggtaataaaactctgagtggtttctcactgatctcaaaataaagtaaacatctccctgtgatctcattcccctttattttcctctcttacttccctctaaccacagtggcctccttcctcttgcttggctctttccagtgcatttcccccttggggctttgaacttgctcttcgtttgcctgggatgttctcttccccagtgggctacttggctcatccccctaacttccttcaagccttttctcaattgccactttttcaaaaaaatcaacatcaacatcgtattcccctaccctcagcatttcccacccccttctccttggtttatttttcttcatagtacatattctttctggaataccattaagtgatatgcatggtttaatgcttgtcttgtccagaagaatgtaagcatcaccagggcgggcctgccatgtgtcttctacattgttgagtcctccatgcctagtgcaaggtctagcagccaagagttgctaaagaaatatcttccatttgaataagttaatgccactattgcttgtgggactgtgtctgtcattttgtctaattaatgagttccctgagggtaggaattatgtttgtttcaccttttcgtaccaggacaacaagaaaatagcagaaaatcataggtgtgcaataaatatgaatgagtggatgagtggaatggtagatggatgggtggatggatggatgaatggatggatggatgaatgggtgggtggagggatgaatggagggtagatgaaggaaggaaagatggatgaatagatgagtggatagaggatggatagatggatggatgggtgggtagatgaatgggtggatggatggataggtgggtggatggatggatgagtagacggatgaatgggagaaggatgcaggatagatggatgattggatagatggggatggctgggtggatagctggatggatgaatggataaaaagatgaatttgggtggatgggcgagtgtgtagatgattgatggatagagggtggatgaaggatggatggttggacggatggatggatggatggatggatggatggatggatagaggaagggtgggtgggtcaatgaatggatagatgggtggatggataggggaaggatgcaggatgaatggatgattagatcaatgggcatggctgtttgggtggatggatggatgggtagaggaccaatgaatgaatggagaggagatgaatggatggatggttggatggttggaaggataaaaaatagatcctgataatttgtgttgaagtgagacatatctgactatcctaaattttgaatgggagagatattaaaggcagtctctgctgatgtgaacaattgtatggagggcagattattttatgagctatcagttcctctttgctgtgacctctgatccatagcctttgcctacattccacatctgcatgtaataaaacttacttatgagatacatatgtctctaatgcaaacaccgcagtatgtacctttaaaaagcactataaagagcaatgactcgagaaagaactattaggagcatgagctctttattattttaaagggcatttcaacaacaccactgaatgttctctgaccataagtctgactcctgttctttctctcactttcctttcttttcttctcttctcaggatatcaaagcagactgcaatacctgcgtggaaatagaagacagaaaggtgagtcaatatttttcatttttagggttgcaaacaaaacaagaactctgtgaattgaacccaggtgtttaaggcatgcccctctcgatgatggtttttaggtgattcacggtctatgacatatttaaagacaatcagacttaaaaatgcttgtcattttactcctttacaatctgtgttacttctgatggcttcatgaggagtgcatattgtaattttttacaaaaaatgtggtgctgatttctgtttcagtcatacccttcttttcaggaaaatactttaacacttgtcacattgaacttgaatattgatgttgacgttcattgtgtgtatcatatgtataattaattatattattacttacattatagaatatataatattaggcttcccagggtgtgtccctatatatctgactcatacacttgaaaaagagctcacggccaggtgtggtggctcatgcctataatcccaacactttgggaggcagaggtgggtggatcatctgaggtcaggagttagagaccaacctggccaacatggggaaaccccgtatctactaaaaatagaaaaattagccgggtgtggtggcacatgcctgtaatcccagctacttgggaggctgaggcaggagaatcacttgatccttggaggtggagactgcagtgagccaaaattgcaccagcgcactccagcctgagtgacaaaataagcctccgtttcaaaaaaaaaaaaaaaaaaaaaaaaaaaaaagagctcgcgctcaatttccatcacaacacatcaacacattcatatgagcaacagcgtcctatctgagattaagggggtagggggcaatgccattttctacatatttagagtcccctcacccatttatcttctttgctacacttaatgtgaatcccctcaggaaaagcaaccgttagacaattgtttgttaatattttcacagtctctttttattgacaagagttcacagacatttctgcagcaaagcacatccaagaagatcagattttaccctgtgtatgccttggatccaaagaggtcaaataagcaagttaagagtacatacctcctggctacttttgacatcgttccacaagtttgaaagatgtttctcctttcaagtgtaccattattgtcaaatgggttattatttcaagcagaggttttcagctctgattgtatcatgactggggcatgtctgctgattaataaggtggtggaggacttctcaaaacaaaaatttgcttttaaataaaaagcagttgccacacattattttagggagtgttaatctcctcacattgggaagaataatgatacagtaagttcaattcaatctgcgtgatcccagcttgcagttttgtgttgctctagtttgctggcaaaggaatttcaattcatgtttgcattcaccatgtgtttgcatgctggtatatgcatgtgtgcatttagtgagttggacagatggaattgctgcttaggtgaagcgtgtgtccaaagtcttctaccaatgttctgcccagccgaatcattccgctcatgtcagagtgtttagaaagcatgttccccaacctgcttccaaaggtcattggcatttctcttggacttttatggaattcatcaacatgttttgtccggtatcttttttaaaaatttaattgccaatagtgcttgaaagataacataggaactgatgctgttagaacaacctgagctccatcacgcacaaggtaaataagcaggcagggtaagctctgggcaaggagagtcacccaagctccactccacctatgtgaactgcctttggttaagacatcatgatgatggcaactgccctggtttctggctactctgtgatgcatcttggtgggaaaaagtcattaatggtcatactgtgcatatgtgatttcagctcttctcaagaaaggggaaaatagacacacacacacacacacacacacacacacacttctagttttttcataaattgttggattgagtcaataatgtcaaatgaagccttgtttctgatgagttttcccatttttttctaaacttgacctcatatgactgatagataaatttctaaacaatttgttgcagttaattggtgatgcatcttagtgataagaaaaaataatgcccagttaaaattctcagtgtcttactctctaaggactttttttaaaaaagagtcttttaaacaaggtaactcctctcctctcctctcctcccctcaactctcctctcctcccctctcctctcctcccctctcctcccctttcctctcctcccctttcctctcctctcctcccctttcctctcctctcctcccctttcctctcctctcctcccctttcctctcctgtcctcccctttcctctcctctcctcccctttcctctcctctcctcccctttcctctcctcccctttactctcctctcctcccctctcctctcctctcctctcctcttctctcctcttctctcctcttttcctccttccctttttctctcctcctttccttcccactttctcgtcttccttcctccctccttccttccttctttttccttccttcaaattcccagtaatacagtgaatcttatactcacgctatagtttctctgtttctaacaattgttaagaagagattgggagtgaggttttaggagcttgctttatatatgggagacatttctcttaattgaacagtcaagaagcaaacgctaatgatccctgagggacggcgtgcccctcaccccagcagaacagctccatccccctccctctctgcttggtgatatggtgtgaggccacacagggagccattggctgtggcagccagagtgattgccgtcaggttctgggagtgcactctggtgcctctgccacactgatgggttgtttaggaaatttcaccactggagtgatgacagttgctcacgcacgtgtgtgtgtgcatgtccctctccatttaacccaaatgcttctggcaaaatcagtaatttgataaagtggaattgaagtgacaagagatggcagaggtgccaaaataataagtaaacctgtctctgaagcggcagcctcttggcctatgtggatttttacgactgttgagagctctgaaagagaactggtggtgctttctttaaagctctttttattttattttattttattttactttagttaagggagcttcacagaacccctataggatgtgatggcttctcaagaatcactttattttttattattttttatttttctttcacctcccctggctttctgtctacttcgtttccagatattccacatatatggatatatttgtgtacctcgatttatagctatgtatattgttgaatatcttcttgatagaagaattttagaaaagacaaaaccttaggttttccatggagtcctacggggcctctccaaattgtgcctcattcccattctcttcctttcaatggggccgattatcttgagatgaatgattttcccactgaatcttagaccacatatcatgatagaagataaactgtgaatttcaacagtggaagagagccttcatttttttttttttttaacagtctccctctgtctcaaatctggattgcagtggtgtgatcgtgatctcagctcattgcaacctccgcctcccgggttcaagcgattctcctgcctcagcctcctgcctggctaatttttgtattcttagtagaggtggggttttaccatgttggccaggatgatcttgaactcctgacctcgtgatccgcctgcttcagcctcccaaagtgctgggattacaggcatgagccaccacacccggccgagagccctcatcttgttgtagagcaataaaatcattcttctttatctgcgcacagtctgggctcgatctgagactcttcatagaataaaagaatttttatcctctcctgtttttctatttttctttatcccagaagcctattttctctcaggctgacaggaaactaattgccatttggaaaaccttgcctggctgtttatggggaaattcataatgtgtattggagtgtggctttatgtttttctttcgcttccaagcccgccaattagcagagcccctatgaatgtacctgcttggatggttcctggccattgcttaaactctctcagagggtgtcctagggagatcctaagggatggtggagtttttcaccctttaataggaagcaggagcacaggttttttgtttttttgttttttggtttttttgttttttttgtttttttttttcctcctgcaggtgaacgttgtggagctaatgcagatttagcaaaggtgacgggaggtaacccatcacttggagtggctgtatggcctcacaaaacccgatgcgtttgacatttacagtacctgtgtttctgctggggcactgaagcatttaaattcatttttatttgtggtgtaaaatccacctgaatttcaatactattataaagactgagattcaggtgatgagaggagaggctgatggatcagtcagggggagaatctgtcaagaggagacgagagcccattttataaacacagacagggcttcctcttctcacttatcgcctggcctggtgcagctaaacagtttcagatctgctataaaattgcatgaaaggagtttgagtggttttccaagttatggcgactttcagattgggtccaattgaaggtgcgattgggagatagctttcgtgctgtggttaacactgagagttctgaactcatctttttacaatacttcttccagatcaggtatcttaagtaccgccgaatacttaaaacagttgtggtgtggaagtaccatcattttccctgttttacaggtaaaataaaggaagctcaggcacatttaagtgacttgcctgagatcactcaagcatgagaccaggatttaagctcagagattcttactccagagtctgtcctcttagtttcaatactaccctgcttgcggttttcaatatggggcaggctttcagctcccacattgcagctctagctggttcacagtgaggattcttcacagtgtttacaagcctgcccttccgggaagtagttggcacccaacagtggggtggtcagatgtcttctggctttgagggtgagggacagtagcactggaactggagtgctgacctcagtttccaaagacctgattcggttcctaggtttggcaatttcagcagagtagatacacgggttagaaattattgcttaaagagtattagggaggctgggcactgtggctcatgcctgtaatcccagcacttttggagggtgaggcggcctccaagatcaggagttcgagaccaccatggccaacatagtgaaacatcatctctaccacaaatacaaaaatttcctgggtgtggtggcacacgcctgtagtcacagctacttgggaagctgaggtggagaattgcttgaacctgggaggcagaggttgcagtgagctgagatctcgccattgcccttcagcctgggcaataagagtgagacttcatcttaaaaaaaaaaaaaaaaagcaagaaattcttgcttaaagagtattacggaaaatagctaatgcatgctgggcttaataccttggtgatggattgataggtgcagccaaccactatgacacacgattacttatataacaaacctgcacatcccgcacatgtaccccagaactaaaaataaacataaaaaagtaattcttgcataggtaatggttagtagctcagacaaattaagtcacttgcccaggattattcaggacgtatcatgaggccacgatttgagctcagagattcttactccagagtctgtacatagcctttggagcttgaaatgtctgggtttcaatcccagccctcccaaatagcaactctgtgaccttgagaagctttcttaccctgtatatatcttcatctgcttatctttaaattgggagtgatacaatctgcttgaaatattggcttgagaaattcataatactgcaaatcattttatataatacctggcacaaaataagaactggattaactgtagctgcggttatttttatttttgctggtatccacacctacaggcctaccatgtcatttataattacatttattttatcaaatgaggccctggaaagtgttaggggatctcaggggagtatgcaaccaatgggacctagtaggccttggaaatatttcacaaaggaagaggatccttggtgtaggtcaggaaatacaaatgcacctgcctgccaagtccaggtaggaaataatgaattaatgaagaggcagaggagtgattgtctttaacgtgaagtcctatgtactgcagcgacctggaaggtgataccttcatatcttgggagctgttattcagctaaatgtggccatgtggaatatagattcagtattgctgttttctaagccaatctgaattttcctgtaataccactgattttttacttactatgagcaatccaaatgaagcacacatgcagaaaagtttcaagagacttacaagacttgagtgttgaaagctaactctcagtgggttagaaagagctcccatgtgcctaattccaggctctgtcggtctatgaaaggccctcctggcagagggaacagaatggcgaggacaagacggtgtagagaacatggtatgtttatggcgaatgcaagtccagtgtgtgtgtctgagattggctaaaggagagactacagcagtgagtaggtagcaggttatggagggaatagtttatcaggccaatgcattagggttctgtgtcaatcctctgtccccacagaaggcaaatctttactgtatggggccagagttacacagcaccaagaaggtacttaaactagtatgaagaacccagccaaagtgaaagtcagcaggggaataagaactggggttggagcccagagaaagacccagagactggccctgggtgaatgcaggaagctgaacactttgattcgagcaagacgaagtcagccaggaccctgagaaatcacagggctgggttgccccttccttgtgatgtgtgacagaatgaacatgggaatgcaactgtctctttgaaatgttgatttagcggcgggatgcctggattatttggtagttcaacttctaattttttgaaggacctctatactgttgtgcataatggctataaggatatatgagaatatccattttaacatcatgggagttctacaatggaatattatttagccattgaaacgaagggaaatcctgccatgtgcaacaagatagatgaacctagaggacattaggtgaagtgaagtaagccacacacagaaaggcaaatactacatgagctcacttttacctggaatctaagaaagtgaaactcaaagaagcagagagtaggatggtggttgccgagggctgggggcggggtgaaaaaaaagggaggatcttggtcaaaggatacaaaccctcatcatcagattaagttatagataactaatgtacagcacagtgatgagagtttaattaatgtgttttagacttgaaatgcggtaagagagtagatctcaactgttctcacacacacacaagtctgtgagatgatggatatgttaattagcttggtagtagtaatcatttcatgatatacacatgtatcaaaaggtcacattgtatctgttaaatatatgcaatttttgtttttcagttttatctcaatacagttagggagaaaaagagagatgtggaatagaagaggaacacattttcctgcaggccggtattgtacaagtgttgaaacacttagattagatttcaggtggcaaatgaggtaccttcaggcagttcatggatatggtatcaaatcacgtagtagggaagttatttccttgtcaactatttctcagaccttgagactacatcaaagacataatttggtggttggttaaaaaaaaaagaaaaaaaacctaaaagactcaaacatttgatcatctacctttttgaccaagagacccagagcccctgacaggcaattctggcatctggctataaccgaatgacagtgttttacttttgcattagagttactttctacatatgacaaaaaaaatactgttctttctgctctttctgtttacttcaacgagctatttcttttctttaaaacaaatactcccatagactcgtaaaacatttattgagaacagaaacaatttaaagaaaagcacatggatgtgtaaaaattgtgagtatggatcgcacataactgaagtgtaggaaacactgttttctactggtgggtttgcattcaggggagagtttcttgtttgcattttgtaagtttcaaactctccttgtgtgcaggagggaaccagaagtgggcagggatggatacaggagtacagggtggaaggcagactggaggatgggtctgaactagagccatgtaggagatggggaggaggaaggtttgcattttcaagagactggataagtcctatccacatgacttactgacaatggatgggtgtcatgaatgtctccacccaggaacttgtcacagacggctcagcttaagtatttgtatatagtttgctgccgtgaggaagaagaaaggagttgatcaacactgacaatggattgatctcctggtttagggcttatatgccagtgaggttgcatatgagcatgacatagccagcaggatttgtttctattagtgccagtctcttgcccctgggagtaggagtggactagatctgtgcacttctgatagcagaacaaagacatgggagaaggttcactccttcctggaagggcctctttctagaatggggagtattcatgaaggagtttcccttcaaagaccaaagcgaagatacttaaggcacataagggcagaggctgctgtgagcgcccatctggatgagactcacagagtcccctggggattggatttcttttctgtttccaatgtcctttgtttaaggccgttaggcatatacattaaaatggaagaagctccaaaattcctggaatctttggaaatgaaaattagagcatccctgagaaagggtatttaagtttgagtctgaagggagatggggtggagagcatcctgggccaggtgcagaggagggagtctggaggttgagcatggcatgactaaggaactgaatacacgtcagtgtagctggggctcaggcagcagtgggaaaagtggctagagataaagctcaaagcaggcaaaggctaatccacctgaaaccttttgaccaggaagagtattatgtcctttaatatagaatgaaatctgtgtcacatggactgtgatatcaccatgagaaatggtcaggtgtgtaaagacagtttctttgtcttatagagtctacttgctcatagatcatgtttatgtatgacctttcagacttctgtcagttcccttctggtccagccatctctagccaaggaatgggacaaagagatctaacaccagcaaagctttttgctgtgtcgcttggcttttctgttcattctgcattttacatcctatgcaaattccctaaaactgtcaatcatcttcagattagtaaccctcattcctcttgggcatggctctcattccaaactaatgcatagccactagccagcctgttgtttagggcaacacctcacccctggtcctactatctctggtcaaagaaatgtgcgcggtcatctagcgtcagcaaatcatcttgtatctacagatctgcctcagctcctttgctcagtaagaacttgtggatgggatcttggtaggatgtgatacatataccacaagtagatctcattgtgtcctttttctctgctgagaagcagggctgtgcgagagacagctgcgcatgtagcccaccaccagtgagattcgacatcatttttactgagactggggaccaggcaatagcagagattatgaatccagtgtctgaaattgcgtgttcagaacccacagataggcagggatggaagtcagttctggagatactcagttggtggagatgggttgctgccaagaaatcctcagcagttttgttcactcctcctaatttatttcaaaaggcaaggtagtacagttttgcagtcaaacggatctggagttgaatcccggttctgccccttcaccagctggcagaccttggaaaagtcacattcctgtctgtccacagctgcatcgtctataaaacagggacagacatcgtttgtaaatcatgcatcccatgcactgttcttgtgtgccgcattagtcagggcattttcaattgtcatagaaaatgaagtcagactagcttaaggagaaaaataagtgacagttatgagtaaagtgggactgtcttcagcatagctggatgctggtactttaatttcaccagatgctaaggacggcaaccaccagctgtattaactcccacctgtggagaaaaggcgcttctttttcagtggcttagtaaagttcctggatgtggcttaagaggtgtcacttagctataaagggcgatgtccctcttgtttgtcttccctcagccaccccagcagtgggatggggtccagctaaatgacttaaatggactaaaaaatgagggagggggctgggcacggtggctcacgcctataatgccagccctttgggaggcccaggtgggtggattacctgaggtcaagagttggagaccagccaggacaacatggtgaaaccccatcgctgctaaaaataaaaaatataaaaaaatattagccaggcatagtgacaggcacctgtaatcgcagctacttgggaggctgaggtaggagaatcacttaaacctgggaggcggtgattgcagtgagctgagattgtgccatcacattccagtctgggtaacaagagtgaaactccatctccaaaaaaaaaaaaagaagaaggagggagtgtcacctaatgaaaccttgactgatattttttttccagaaaggaaaataaataataataataatagcaactaccttgcattgaggatttactacatgccatagaccattttttagtactttatgcatattctattattgaatccttagaaagatcctttaagacagatacaatatttatccccatgttacagatgagaaaaatgagggaaagaggtgatatggtttgaccacgtccccacccaaatctcatcttgaattggagctcccataattcccacatgttgtgagagggacctggtaggaggtaattgaatcatgggtatggtttcccccaccctgttctcatggtagtgaataagtctcccgagatctgatggttttataagaggaaacccctttcgcttgtttttcattctttctctgccaccatataaaacgtgccttttgcctcccatcatggttatgagacctgccagccacatggaactgtgagtctattaaacctttctttctttataaattatccagtctcaggtacatctgtatcagcagcgtgaaaacagactaatacaggaggagttgaagaatgtgactgaggccgggcacagtggctcatgcctataatcccagcactttgggaggcttaggcgggcggatcacctgaggtcaggagtttgaaaccagcctggccaacatgatgaaacccttgtctctaccacaagtacaaaatgtatccaggtgtggtggtgggcacctataatcctagccatgctattcgggaagctgagttaggagaatcacttgaacctggaaggcagaggttacagtcagctgagatcacaccactgcactccagcctgggtgacagagtaagactctgtctccaaaaaaaaaaaaaaaaaacaaatcatgtcactgaggtcacccaggtggtaactgtggaggtgggattcaaacccaggaagtctttgtttgactcttaacctctaggctgtactgcctcttccaagcatgcttcacaggaagaagaaaatacgtcccttctgtgctcctcatgctcagggcctgacacacaggtaaacggtgacttacgagagttattgcaacaaaaccctccacataacaggaaaaaccttggccactgctaaatgtcatcctgtgatatatctctgcattgaatttcctcccaattactcagcctaaggtattatctcggggtcctcaatgagtctgctccacagaaccatcaaaatgctcacggttccaagcagtgcctcacttgccagcacagctgacagttatttttgtaggcaagggcttctgactctaggatgggtctctgcacctgccttttatatttgattcacaggttaactcttttactaaacgttgaaaatgagatgttagtcgtactttcctctttcatttatttttgggaaatttgagggtggtggtgggttgggggagagggaggcaggtaaaaagacgcagagcttctaaaatgaatgtggtgttgagttaaattagcctctgatgggccggaaacctaaacgacagatgatgagaagctgctgggcaccctcagcagtgccatggacacagtggtaacccagagagtgtaatgaaaagcactgaggtagatcgggctattggtctcatacaccttcagtcacccttgaagctggctttgggaagctcatctaaagaatgccaggtgtaatcgtgtggctaagagcttcagcttaggattctaaaaggcctggctttgaaccccagcttagtggcttcctggttatttaacctctcagatgctcaagctcttatataaaagggagaggaggagagaatattttctggggtcactatgggactcaatgagctcttacactgagggtacttatcatcttggctaggcacaggatgcaccttgaataactgcaagctggctgggcacggtggctcatgcctggaatcctagcgctttttggacacaagtgggaggattacttgagctcgggagtttgagatgagcctaggcaacatataccctatttctgcaaaactgaagaaaaaaatatagccacatagttaggcatgatggtgcgtgcctgtagtcccagctactcaaatggcttaaggagaaggatctctggagcccaggagttcgaggctgcagtgacctatagtcgtaccaccacactccagcctgggtgacagagcaagaccctatctttaaaaaactaaagaaaaaaaaaataagtacaagctgcctgattattacacttaaatctgctttcgtcctactcttttttaaatctttgactctgtttcttagattcctagtgagatcagagagtatacatctaggacaagttaagataatagcaaagtaaattacaaagcttaaactggataccaaaccctcaattacctgtctagagttttgtgtatcctgtagctacttctcaatctgactgaaagagtatagagttgagagcataagtaaaggtgcagaccagggattggaaacagattgaatctctggtgtcaagtcatattgattgtggcggcacagaacaccttgttgatgaggagtctgagattgtggcatgtgggttctcccagaaagagtgcatgattgattagtgatgcctgccaagggtggaggagtgagagccacagggcacctgccaggtatagtttagttgtttctgtcacagaatctggcatctgaggagtaatacaaagccacgtgttgtgtgtttcagcccaaagatgcttctgttcttaggggcatgcctgttttccttatgttttggatttgcagcttaacaaggcactggtattttcatggatagtgcatggcttaaagataatttagcaaataagagctttatatcaggcatgggtagctagcctttcctaggtgctcgagaagccttctctgttgattacattatggtagcaattcacatgatgtcatcctcatataactagggttatgttttgatgccttaattttaaaagtgtgatttgtctatgatgatatttgtcatctctttgaaattttgtattaattggggctgaaatgcttacattttaatatcattatttatagctattattttcatgtgccacttattttacttaaaagaagcaagtctattttgtgtaatttttagcaaacttctttctttaaactctgaattaaaatgcatttaggaaatgcttaatcaagcacagagctatttttcaaagattgttctgtcatctcttctaaaaagatggcagtggcttttttgtgatgagtggagtgaacgttaattaatttttctttctcttcagttggtgggttttattatcccacttcttgatgtgtgattgggtgacttcacactttagatagaaagcatgccctatccaaatgtgatttatgttttcccagcacttttgcatggttcagctgaaattttcttcgtgttgatcaaggtcagaaaacccagggattatgccatccatctcagcaagtaggttgctggaaaaatttgtgatggaacgtgatgcaataacaacagaattcaagggtggggtgggaaaccatgcccgtgtgtgtgcgtttgtctatcacatgaacacactcacccaattcacttcttatattgtgcttctttttatcaagttacaaggctttttgggcaattctgggttaggatttatttttgcataaagccataaaaactgtgtgatctttttactgtggccatcttaaactaacagctatcagaatttgcagatcaaccagaggtttttcatattttctttgtttttttccagagtgattgcagtatgattgacaagtaaaaattatatgtttaagatatacagcttgacgttttgattttcatatacattatgaaaaagtcgttagaatcaagtgaattaacacatctatcacctcatatattgctattttttcttttgtttcttttcttttgcgtgtgtgtttgagtgtggtgagaacacttaagatctaccctcttagcaaattttgtatttccttttcaactgaaaggttttctgggtgctttggaggacagaaccttcagaatagaaaaggtcctaagcttaaggacttctagcttttggttaagggagcacagtagaaaagcaaatgctcaccatgagccaggcaggcagatctgatggagccagggaggtagacggcacttatcatcctaagtaaccgacccatggtatatggagaatccagtcaaaggagtaacttacaaacttcaagtccacctgtcaaaatagcaccctaacttacagtaaggaaaatctatctctgtctgtctatctatctatctgtctatctctatatattgagacagggccttgctctagtgtccacgttggagtgcagtggtatgatcatggctcactgcaacctcaccctcctgggcacaagtagttatatagtaccaagtgggcatgttgtacttactcagtgtgatcctcctacatcagcttcccaagtagctggaaccacaggagtgcaccgttatgcctggctatgtttttttttttaatttttgtagagacggggttttccctatgttgtccaggctggcttccaagtccggagctcaagcagtccttccatcttggtctcccaaaatgctgggattacaggggtgagccactgctcccagacaaacatatgtatttttaatttgatctattcagattgagttttcatgttgattgaattcaccaattcataagttgacaaatcttaattttgccccatgactggaatgttttcataaagaaatcataaaattagaagagctaaggatataacagaaaacatacccccaaagaaagcataagtagacttaaacacccggtaatacctttccttgatagtggtatgaaaatgcaaattaaaaccatataatataccaatctctatctactaaaattagccaggttaacatgaaataagaatactaccttttcccatattggtgatgttgctataaaactggtttccttatggccgggcacggtggttcacgcctgtaatcccagcactctgggaggccgagctgggtggatcacaaggtcaggagatcgagaccatcctagctaacacggtgaaaccctgtctctactaaaaatgcaaaaaaaaattagccgggcatggtggcgggagcctgtagtcccagctacttgggaggctgaggcaggagagaggcgtgaacccaggaggcggagcttgcagcgagccgagatcgtgccactgcactccagcctgggtgacagagcgagactccatctcaaaaaaacaaaaaactggtttccttatttacttggtatgttgcaatttggtagaaatcatttaaaaaccagagtactcatacgtatgaacaaccagataattatttcttttgacccaatcttactcattatttcttattattccagtcgaatggaaacaaaaggacacctggactgagccaccattgttattttacttgcaatgtcaaaatattggcaacaacctaaatgcttaatcttaaggtaatggcttcttatgctcagcacagaacatgatagagtattatgcggctattaaaaatgatgaatacacttgtgtcagaggtccatggaatagtaattgatataatgtttaataaaaacacatcttataagatattttgaccatgtctaaaatttgcatggaaaagagaaatattcatgttcatattcaaacatcattttattaatttgatatttgaacattagaaagtaagacataatagaagaatagggaagtctgttgggatgcatctaggaaggaatttaggactgagtttgggcaagttccttagtctttctgcatctcagattcctcttctgaacccaatttgtagttttctatccctcacctgctccccaccctttccgcctgagtccccaaagtccgttctatcattcttacgcctttgcatcctcatagcttagctcccacttaggagtgaggacatacgatgtttggttttccatttctgagttacttcaattagaataacagtttccagtcccatccaggttgctgtgaatgccattaattcattcctttttatgacggagtagtattccatcgaatcagcgtatcccagtaattataagagttcatgaaatttttgtgtgccattttacattcacactgccttttcacacgccaagttgcctttaaaaactgttgcgactactaagtagataggatgataatgcgaaataacaatatcgaacagctgattttaaatggcttggtcatatgttaacttatgcactgtaccaaatgtttctgacattatttggaataggtgaacccatccgatagttgttaatcacattcggtttcaaagaccgtaggtccatctcacctaattatactggtattggaggctaaggtaacattagctagaaatagatacttatcttttatttagtttctatttatgagcttttggaaatacaaaggtcattgaaatataatcatttcttataatccaccaccataacgcttagagtccattggagaaatatacatccaatataaatatacatccaatataaaataaccatacaaatattgtggtggggaagggtggcagggagggaggagagtgagagagagaagagggagaaagagagagagaaggagagagagaaaaggaaggacggatggatggaaggaaggaaaaagaaaagaaagagaaaagaaaggaaaggaaggaaagaaggaaagaaaaaagaaaaagggagggaggaagaaaggaaggaagatgggagaaaaaagaaaagaaagaacaggagaaagaaaagaaaagaaaagaaagagaagaaattctgtttatgtgacagaatcttaaacaagcatataagactactgacttcaggtacacatggatccaggtcctgaaatgattccataggaaacctccacccaccatgattccgcttctgcttttctgcttttcttgggtttggcttgccttgtgaagcagtgaggcagacatcagcagtgttagtcataccttctaccaattcacagttctggtagaaagatcgtttctcttcccaagtaatcctaacttaagcccatttcttaggtggacctatctctgatgttatgggtcacttgccccctttcccaagagacccattgactaaactgaatccccctagaccccaggcaagggcgtgtgggatgttgatcaacctggtctgaattgtaccccagtccctgaagtgctgatatgaagccagtgcaatgctaacaatatggaaccacaacaggggaaagacagctccctgaagaaaaaccacagtgcttcttaccagagttggaatagagattggtcacgtaaatgcaacacttgcttatagcagacagaggtgcaatttccaggtgatcagtgatgtctacacttcccaggctcatcattttatggtctccatgctccttccagagtagtcttcatcccatctgtgtcttctctatccactctctgatcccaaaggtccctcatatccctgtacgaagttgcaagtaccagtcattcaaaaatgtattgaggccaggcgtggtggctcatgcctgtaatcccagcactttgggaggcctaggtgggtggatcacctgaggtcaggagtttgagaccagcctggtcaacatggcaaaaccgcatctctactaaaaatacaaaaattagtcgggcctggtggtgcatgcctgtaatcccagctactggggaagttgaggtaggagaatcacctgaacccaggaggtggaggttgcagtgagtggaggttgtagtgagcctacattgcgccactgcactcaagcctgggagacagagcgagactccatgtcaaaaaaatatatagatatgtattgaacacaaagtaatgaaatatggggctgacttgccggggtggaggaccagcttcatgatgggttctgtgacccatgtgcctggcagagagaagaggctatggacaaaggcaaggacagaaatgtatcatctgtcatggagataagtcgcatattcctactcacaaaaaggcaggtgtacatttctggacagagaatgatagccaagacagtgctagagagaaaagtagttacagatattaagagaagaagcaaacacttgttggaggaagtgccatattgggaggatcctgaaagactggccaggtggaatggatctgcacacctccagaacaaaggaaggagactctaggaagggagaaacagtgagggaggaattacttcttttagagacatgttaagagaatcctattttaggattaccctaggaaataagtaggagattcagcactctcttggttctaatagaaacaccattcaaattggcttaagctaagattggtattaagtccttgttgtgggttgaatagagtcctccagaaaagatatgttgaagtcctagcttttcccacccccatacctgtgaatgtaaatttatttagagatagggtctttgcagatgttatcaagttaaaatgacgtcatcctggattggagcagtcgtaaaaccaatgactgggttctttatttttatttttttttcttttctttttttgagtcagagtctcactctgttgcccaggctggagtgcaatggtgcgatctcagctcacctcaacctccgcctcctgggttaaattgattctcctgccccagtctcctgagtagctgggattataggcacctgtcaccatgcccggctaatttttgtatttttagtagagacggggtttcgtcatgttgatcaggatggtgtcgaactcctgacctcaagtgatccacccacctcagcctcccaaagtgttggaattacaggcgtgagccaccgtgcccagcccgaatgggctcttataagatggagacctggagatgtacgaatgtagactcacggggaagaaaccatgtgttgatggaggcagagactggagagatgcacatacaagccaaggagcacgaggggtgctggccaccagcagaagctacaagaggcaaggaaggattctttcctagagtccccagagaaaacaagaccctattaggactttgatttcagacttctagcttccagaactgggagagaataaattactgttgtgttttttgtttgtttggtggttttttttgtttgtcttttgttttttgacacagtctcactgtgtcacccaggctggagtgcagtggcatgatcttggctcactgcaacctctgcctcccaggttcaagccattctcgtgcctcagcctcctcattagctgggactacaggtatgtgccaccacacccactaatttttgtatttttttgtagagatggggtttcaccatgttggccaggatggtctcgatctcttgacctcgtgatccgcccacctcggcctcccaaagtgctgggtttacaggcataagccactgcgcccggcccatttctgttgttttaagcaacccaggttgtggtgatttgttgcaccatccctagggaactaacatatttccatgtctgaaaatcgagggatatctggctttaggtatgcctaaatgtaggtgctcttgcaaatgtcatcagaagtgtatctgtcccaatttctcattttttttttcttggagttgactgcaattcaggtgggctcttcccaagcagagcaaactggcccagaagattatttcaagacttgcatttgacaaatttagtgacaaagccctgggcttggtcaggcttgcatcctgtgttcattgctgaaccaggccctgccacagtaggcatggtgtgttagtctgttttcacactgctgataaagatgtacctgagactgggtaatttgtaaagaaaaagagctttaatagactcacagttccatgtgactggggatgcctcacaatcatggcagaaggaaagcatgtgttacatggcggcaggcaagagagaatgagaaaacaagcgaaagggctttccctttatgaaaccatcagatcttgtgagatttactcactaccacaagaacagtatgggaaaaccactgctacgaatcaattatctcccaccaggcccctcccacaacaaatgggaataatgggagctacagttcacgatgagatttgggtgaggacccagtgaaaccatatcacatgggatgtggtatttgtccaggcctgagacccttgtgaatctctggaactttggacaagcgtcagctttacgtggacaccaagggcgatgggagaggagaggttctcaaaaggaaaagaggtcctcaaaaggtttaaaggaaaactgaagggaagtcaacataggggtttggggttgggggtgttattatcagaagtaggtagaaggatgctgcctaggggacacacacacacgcgcacacacacacacacacacacacacacacacacacacacttccctaggtcaactaggatcagataggtaggctggagaatagtagaggtgagtgttgtagttacggggagttcggaggaaggccttccatgatcagaaaggtgtgtggagaaagtggatagggaatagagtactatcctgccttccagtcaattttggggagtcatgagctgtttcgtttttacaatggcagcgcctgccccagttgggtcctagcccaaggtcaactctcaatagtaaataaaggtgccaggaaggcagtatagcaaccaagagaggaggcagaaaggtcctgaatggggagggccttgggaatgaaaactttgacttgatcattacacattctatgcatataatccacaaacatttacccctatcaatatgtaagctatttcgtattgataggaccagctcggaaaaaaggataccaggagcctttacagatgttattctcaacttactttctttttttttctttttgtttttcttttctttttttttttttttttttgagacaaagtctcactcttgtcccccaggctggagtgccatggtgcgatcaagggtcactgcaacctttgcctcccaggttgaagcatttctcctgcctcagcctccctagtagctgggattacaggcacccgccaccactcccagctaatttttgtatttttagtagagacggggtttcaccatgttggccatgctggttttgaacccttgacctcaggtgatctgcccacctcggcctcccaaagtgctgggattacaggcatgagccaccatgcccagccgttaactcaactttctatgcacagatccaaaagaccaaaagacttgaaaaagaataaaaggcacttttaagtactaaatgctttctacttgcaagactaactgctttacaagcatgattcatttaatctgcctatttaaaaaagtagatagatactttttttcagatgatgaaatagaattccaaaatattcaatgaaagtaccaagttcacataatgagtaagtggcaggactacaactagaatacaggttttccgtgctctagagaccatagataatttagctcctgttagaaggcacagaattaagggtggtcaacacatctgtcattccttaaggcccttttgtaacactgaactgatatatctccatagatacaaacacacatcaagatgtaaatatatgtgatatgtttctatggagactggaggcctattttattagtctaagatccatggacttattgcccctaaaaggctacctacatcaaaagatcctaaaaagaaagttttaaacatccagcctaaattaagaattccatatcaaaaacatcagggagctaggattaaataaaaattaagcccggaagcagagtaatgactcagcagttcattagagccttacattttcaatcaaagataaaatctcattaaaagtatatttttgattagggaacaagtttgggctgttccaaagttggacggctgtatccatagacatgtgagccatgaaatccttttttcctcttttgtaactttaaagatagtgagcgatttatcttctgacatcactatacaagttattaatatagaggaagactgaacaatggtggcagagctttttatgtatctaccagtgacttttaccccataaaattaaaaggcctattaatataggctcttccaattttaggagcaatttttgtttattactaaagtgattaatcagtaaggaaccataaagaacatctaacctagtaccgcctaatagaaatataatgtcaaacatatatgtaatgttacattttctagtagcaacattaaaaaagctgagaagaaacagctgaaattaattttcctcatataatctattcatcctatatagccaaagtattctcatcatctacttaaattaaaagttttgttttgttttgttgtgttgtgtttgagacggagtctcgctctgtcgcccaggctggagtgcagtggcacaatctcggttcactgcagcctctgcctccttgagttcaagcatttatccaacttcatcctctcaggtagctgggactgcaggcgtgtaccaccacacatggctaatttttgtgtttttagtagagatggggtttcatcatgttggccaggctggtttgaactcctgacctcaagtcatctacccaactcagcctcctaaagtgctgggattacaggcatgagccgctgcacctggccaaaagttatttatgatatataatatgtttaggtgtgtgtatctgtgtgcgtgtatgggtcctaaaccttcaaaatctagtgtgcattttacacttacaaaataaagagagtgaaaccaaagatttgagatttctctttagaggttttgtgataacacaagtgtttctattttgacagcggattgcatactagatttttcctttttgctttaccatatgtgggaaatgacacttctaagacacaagatacacagaacaaatgtagggaatcctttaagctctgtgtatctcagagtagatgctctgactgattaattggaagaagtgctaagataccactgacttgaagctttgaaagttaatcacttgccatgaatagctgataaggcttgtaacacggttcatccaggaggctgagtgaggctgggtagatgggtggtttatcgcattgtttccaagtgtagcatgaattccacccttcttacatgaagccatttggggtggcacatggatgtggcattcagtataattgaatcatacagtgagactctaatttctttctcaaatccatttcattctttcagatgtcaaagagatcgactctgcgtgttgctattatatctctaacacctctctaacccttgctaatctttttgaacagagagagagggcaagcaagctttcaacagacaaaatatgcagccagaatttcacaactgaggaacattgcagtgttccacccattcagtctgagtctccatctatttatggcatatcagactggttttcagttttgacgatgacatgaaatcgcgttttaaagtttactgacacgtaaaaaagtgagcttaaagaaaaataataagctaatcatggtaaaggtgactcaaggagaagataacaatgacgagcttgatatgtggatgttctgatgtttgggaaatgcttgtcttgctatattggtgatggaaaggggagacttctccatgcttgctgcagacatcattgcagtgcctcgtttcttggtctcactttcctttctttgacctgggaagtttccacaaatgatgcttcatggtcgcattctggatcacatcttacagagcaatggggaaacatgtacagtcatacccctctcttctaggaggtagcctcattatctttttatgctaagaacaaatagattggaaagggtctaacatttttttgagcatctcctttgctcaaaactttaaaacacctgtataaagcatagtctaaactaaccaccacaccatacaagagtacttgagtgagttctttgaggaggaaatggatgaggatgtggtatttgtgcatgtaacttcccttcctttctgttttcaagttcagtttgtccagtattaattcatcagagatgcagagaaaggctaaacaaacactgggaccttctacataaagccatagtttctacttgtttttttttttttttttttttttttttcatacttttctgagctttgcctaatggtctcatggagttctttaaagtagtgtttttatataatctgcctgacaggcaagacaggatggttgaaatttatactcccaaatatgacagagttcaacccagttctgctgtttcataacagtgtggtcttgaggaaatctgaagagattggcaacttggaacttcagttttctcatctgtaaaatggggtcatagaaggactaccacatagggttgtgtttgggaatgagaagagatagaatagcaatttcgtatggagctgcgcatatattcagtaagtggtcgaagtacaatttttactatgagtatgattcctgtctttgctttgcttttctctctctcttttttttttttttttttttatttgtcgcccaggctggagtgcagtggcgccatctcagctcactgcaagctccgcctcccgggttcacgccattctcctgcctcagcctcccgagtagctgggactacaggcacctgccaccacacctggctaatttttttgtatttttagtagagacgaggtttcaccatgttagccacgatggtctcgatctcctgacctcatgatccgcctgcctcggcctcccaaagtgctgggattacaggcgtaagccaccgcgtccggccctctttgctttttcttagacctcctagcagatgatttgacttgagttttattctaaaataacaataaagtttcaattttatactcttattttagttttccactatcaaagtttaccgcttagaggtaatatttaatgagactttaatcagacttctgcggttctgatttacatgtttgtgttttatctttgtaaggcggaaagatgctagatgggcacctaactttgcaaaccattttttaaataaatgttgcaatattaaaagcttcttggttaaaacatgaatgaagtacctttcactgtttcagctaccatggtgagcatagaattgaatcaatatttatacaaagattacaatataaatgcaaattgagctgcatgataattgggcctgagtaacttttaacatagttcgtagaaaacttcaaatttctgtactggtctcaaagtaagtagaaatctgtttaggctgggcatgatggctcacacccataatgccagtcctttgcaaggctgaggtgggtggatcatttgaggtcaggagttcgagaccatcctgggaaacatggtgagacccccatctctactaaaaatacaaaaattagccaggcatgatggcacgtgcctgtagtcccagttacttgggaggttgaggcaggagcatcacttaagcctggaaggcagaggcagaagttgcagtgagccaggatcacaccactgcactccagtttaggtgacagagcaagagcctgtctggaaaaaaaacaaaaaaatatattttgatcgcatcttggttaagtctttgctaccttggttaaaaagtttggtatcttggtagcaaatttttatcaattggtaatatttgcctggcaagctgtgtgaagaagagttcagaagtataaccagatttagcagaagtagttctgtgatcaattagtgatgttgtccttgtctccagaagaggtgtttttcatctccaaactttagtcagttgagaaaataaagtaacaatttgttgttaatttggcccgttagttaaagccgtaaacaaagaaataagcaataacatataatcacaattgcccccctccacaatggtcatttaaccagaaaaaaaaaaaaaaaatctttctccaatgagtaaaatgttcaaacttatctgacgatattgataataatataattaatagacataaccactctctgtaattcagttctcacgtctgtaatgtggagataatagctaccctttcttttcagccgggatactctaaagacaaagtgagctattttgagtgtcaatccagtaaatctttagtctcttctgctattctccaggaatatgcttgtgaaaagtcaagtatgtcccttaaagtaagttttgatattaatatctttcttttctgaacctttatttcttcttccaaatcttgaagttatctcagaaggatacacccttactcctgactgagaactctttgctcatatctactggatccagtttgttttgcccaatagaacaaaatgtcacgattcttttaaagttcttcctgggcaatagtgaagtgcctgtgccttgaatgtgtattgtttgcctgtaaatttcatcatttgtgcccaaggattagggcaattaaaacaacaacagcaacgaacaacgcaacagagtcagcgctttcagctcccactctcagataggaagcacacagccctgcctcctctggagggattgagctctcaggcgtcgatttcccagctgaccactagaggcgccccttgtgcttgtaccgcagttgctgccatcaggcttcgaagccgattgccccttcttggggaaattgtgaagactaaaaaaaaagtgtttcattttatggaaaaggaaagttagacatttgttaaatattaatgacattgaatgtgcttaatggttttgtggtgatgtagaaaagggtttctcaatcttggcattattggcaaactggaccggtgcatgctttgctgcggagagtgtcctgtgcattgtgggtgctgagcagcagttctggcctccaaccgccagatgtcgagagagcttttccttctcccattgagacaaccaaaaatgactctagatgccgccatgtgtcccccggcgcgcaaaattgccccctgtttgacgatcatggtgtgagacgatgttatcattaccagtagattcatactaaaatatttcagggtgaaattttcacagtttattttcagatagcttaatcagaattgaaaacaggataaaggcaaaaagagaacatttttgaaaaaagaaaagaattaaaaaaaaaaaaaaaaggaaatggaaggataagaaaaaaaactatgagagccaaaattcacaggccaggcaagtcacatcaggcctcataggggttgacaagctgcagtgttgagtgctttacacagctgggcaaggagtgaggacagcttctccatccatatgaccctgcttttaggagaggaatgcgtgtgatacaacatgtagaatactggagactcgagtttaaccacagggttatttatttaatgatgaaagagctaactagcagatgcgtattttccttgggcattacacagaggacttacattaaattgtcacataaaaaaataaaaagggtgagagaactgttctaaatttaaaaagacaaaaaggacatagttccagtgcagaggtcaaattttttcaagcctgttaatgacccttgagacctttaaatacggtcctgggcattagatttaattttgaatcaaagttaatattcttaggtgtgattcatggaattgtggttatgtaggagactgtctttattaggagatgcatgctaatgtatttggggaggatatatctatgtctttcaaatggtttaggagaaaaaaatacctgtaatatatacatgcatccaaaactatatataaacaaaactatatatatatgtatatagcttttgttttgttttcgttacaaatatatacgtttgcatacacgtgtatacatgtgtgtgtgtatgtatatatctgtgtttgtgtttgcatatccaaactgcatagaccaaatggctcataccaggtttaaggcgaaagcaagccctcagatctgcacaccctagtctaagtacagcagggtgtgtgagatggtgagacgcagttcaggtagtgcccatcagagatggagctttgcggtcagacatacctggattgcaatcctccttccaccagttaacaggaagttgactcttcatgggttttgtaactttgaagcctcagcaaagtggaaataacactttattttacacgaaatggttgtaagagtagagggagatcgcatatgtgaaaacatgtgtcacgcagtgggtgcctgctaatacctcttcccttcttttctccatgttaccccgacatgttacaaggtggggaagatagtgaatggtccacagtgtgaacagcaacctgtgggcatcctcaaatttgtttgcatctcatttgtgtgtacacggtatgttcaagcagagaaaatagcagaatttcctgatggttttcaatggtatcagcatgcttttatggttcgactttaggatctgatgttaaacgcaaggatgtacgcaaatgtttattagtttcttatgcatggaactggtgggttgctggtgttagaggctaatgtggccagaagatggcagtgcacgataaagaaaagctcccaggcgccagccactgttttaattagctaaaaggaagacaggtatgcttttatatagtttttgattttgtaattttcctgagcagccattgagggcagatgttttcatcttttcccccagtttaagtatcataggagagggaatatcaagatgcaatcaattgctggccacggcaaacctcctgaacttaagtcttgcaaacatcatcagcttgtgccatcttagaaattgctgcagtggaaacaggcatggagctatcaattacttctagggctgcaatcccctctgtccttgaaaaggaagccagctgattctgtgagtgagatgaggggacagccactggaatgggaggtggcttctttatcagtgtcttagaagttgatctggagccctagaggaagaaattaaagatcaccttaaattgtgcatgagggcctagccccctgtcgtgaatgaccgttaactggtcagcaaagtaattgaaacaggaaagtttggaggaaaagaaaaattccttaaagcatttcttttttctcttctagttgttacctttgtctttagagtgagtaatccttcatgcaaaaggagctagcatgttctctatacatacgaagtcctaggcatactttatacattttctggctttacttagggtgatcttcaattaatctctttggcaggttgtattagtaacattttacaaaatgggaaaatgggggctcaggaatagtgaggaacttgcctaaggctgcaggatgactgaaaatttacaggtgaaattcaaacctccatccctcatcatttccctatttcctgtccagaaaggaatgctaaataaatacgagctgtcaccttttatattccattccttttctttattcctgctgtacttactaaccaaaaataaagacaggaggtgttgttaatcattacactggcaataaatgacttcacgtaagtgtactaagagagggagagtttttcttttttttttttttttttttgagatggagtctcaccctgttgcccaggccggagtgcagtggctggatctcggctcactgcaacctccgcctcccaggttcaagcaattctcttgcctcagccacctgagtagctgagattacaggcatgtgccactatacccagctaatttttttttttttttttctatttttagtagagacaggattttgccgtgttcgccaggctgctgtcgaactcctcacctccggtgatccgcgttcctcactctcccaaagtgctgggattacaggcatgagccactgtgtctggccaagagtttcattttttggtcacacttaaaccaagtccagacatcatttgctagttacacaaaagtcatccatacttattgtagaacatttaaaaatataaaaaaggagaaaaacaagatggcctcatcactcaagaataccaattttaacaatttggtgtctgcccctatcctttttccctccaagcacctgaaattttaacaaacagccttcactcaatgttgttttcattatgtcatgaaagtgtttcctacaataataaatatttctgtcttaaagccaccattattaatgacttcatgtcctcttccatcatatggacattttctagtatttaaaaagcttttatttttgtacacttaggttgattccaacgtgacaaaaccaagcaggttctgtctagcttttgcaagacagaaaaaatactgcatattgacaaaaatgttatttgaaaatgtcccatatgtttggctgggcccagcgctgtgctcagcactgcattatttcatttcaaccgtgcagcagcagcagtggggactatcatttcttctacatattaagcagagagaatgtgaaggaacaaatcccttcgatgtaatcagacaggtttccacggttcagatgttcttatcactcaggtagaggtctcaaattagatgagacagtggtcagggccattcatagcaatcgaaggcgtctttcttcatgggaacttcacagatttgtgtgggcttagtctgagccctcgcccctcctcctttgctttattgatgcttcaggaagcctgtgggccattcagtttcatgtcgatgacagtacacctaagaactgctatgcgcaggcctccgttgtactcacaacgcagcttgtttttgcataatttaagcactacgtggttgtgtcgtttaagttctgtgaaattggtgttcttccatccatgaaattatatacatcttgggaacatttctcagttgctaaaggggtgaacacattcttcaataggggtgagacagcagtggagttgatagagcttcccccgaaagcacaggtatctctccttgtccttttgagacacaaaggtaagcattttcttctttaatgctaagggaacgcaattgtgagactaaccttcccattatgtttcaggccataactctttccttttctcccaacctcccccattacacacacccaacccagttaacacatcaagaaacccacagattgcacgtcctttttaaacattctctgcattgctgctactgtgttgtattttgagtgcttaagacaatgataatcttccaagaaatgcttttgattaatttgtgtacctgatttgtgtgtgtatatagattctgctcgtaatgatatgatgtgaaaatactcattatatataacaaaccaataatatgtcgtcatggaaaagcatggttaaactcatttcagaaatctttgcagtgttaaaaacaggaacagcaggtatctagttcctgaaagaatcacacttacagatgaagggcttttgttgttattgttattacttggggcatccatagaaatacagattatgagtatcctttgaattcttggttttaacatcaggtagtaaataccgtatgttctgacttagaagtaggagctaagctatgactctgcagaggcacacagagtgatataatcgactttggatactcagaagggggaggttgggaggagaatgtgggggtaataaactgcatattaggtacaatgtacactacttgcgtgacaggtttaccaatatttcagaattcaccactatataattcacccatgtaaccaaaaaccacttgtattacccaaaggctactgaaattaaaaatatgtaaagttaagttaaataattaaacttaaaagtggtgatctctgctagtcaggataagctagtctgtgcttcagtaacaaacatgtcctgatatcttggtgttttatcacttgcaagcttatttcttgccacataaaattaacttcaggtctaatagttctataagaaggttctcttccaaggggaagtgccaggattcaggctgctcctgtttcatctagctgtatttatgtcctgtatggtttttcaaagttgcagcggccggggaggacagaggatggaaggctcacagctactctgttataggtcagcccagagtggtcacatgacactcctcttactccctattggctagaacaagtcacatgggcccaacctaactccaaaggagtctgggaaatgtgtgctcaggaagcacaaaatgaatgatgacacagtgaatgcatgttatttctctccaccgtattttcaaaacaatcatcttgagtgagagcttcagaaatgaaagatgacacatgctaacaaaaccactcttggaaacatcttctatgccaagcactgtgctatgcacctcacctgttgtattagtccattcttgcactgccatagacaaatatttgagactgggtaatttacaaagaaaagagatttcattggctccgggttcagcaggctgtacaggaagcaccacggcttctggggaggtttcagaagactttcagtcatggtggaaaaaaaaaaagagaagcaggcgtgtcttaggtggctagagcaggaggaagagagagatggcaggaggtgctacacaattgtaaacaaccacatctcatgagaactcagtatcatgagacagcactagggagatggtgctaaaccattagaaaccacccccatgattcaatcacctctcatcaggccccaccttcaacagtgaggattacaattgggcatgtgatttgagcagggacacagatgcaaaccgtattacctgcattcttttatttagaccccttggcaacagcagtggggattttcattttctccatataagaagtgaggagagagaggttgagcaaagtaacttcccaagcaccgtagtggggacaataggagtcaaactgaagactaccagaggtgaagcctgtatcactgtccaaccagccatttgacctgcagattggtattctttattttattattattatactttaagttctgggatacatgtgcagcatgtgcaggtttgttacataggtatacacatgccatggtggtttgctgcacacatcaacccatcatctacattaggtatttctcctaatgccatccttccctagcccaccacctcccgacaggccctggtgtgtgatgttctcctccctgtgtccatgtgttctcattgttcaactcccacttatgagggagaacatgcagtacttggttttctgttcctgtgtcagtttcctgagaatgatggtttccagcttcgtccatgtccctgcgaaggatatgaactcatccttttttatggctgcatagtattccatggtttatatgtgctgcattttctttatccagtctattattgatgggcatttgggttggttgcaagtctttgctattatgaacagtgctgcaataaacatacatgtgcatatgtctttatagcagaatgatttataatcctatgggtatatacccagtaatgggattgctgggtcaaatgttatttcttgttagagagcttatcctctaaggctgattatgtctggagtttttgtaggaagtggttgcaggatcctgaggttgaattgtttcttgttttcatatgtgtttataattcacatgaagtgatagaatagactttgaaatataaggaaggtatttctcttaagtcttcacctccacatatattatatatgaaaatctagatttatttgatgtgggcaatagataatacttttttcctaaaaatattatttttatatggtaatttcttctcatgtgttttaaatactcatcttctaaggctgagtaagtgtatttaatgcacaaattttttttatgtttatgcaagagatgtttacacaggacttatctttcctgtaaggtgcctcagcctgtctatgacaatgtctactataaacaatatcaaagggtttctgtattttatatcttcctgaatgtagacatattccttggggacagttgtcatgaaaatcctctggaagtactttggtgacatgtccgtcattcatgttctgtttggttcttccctgaaactcccacaacatggaaataaacagagagcccagctgttttgtttctccgtcttcctacggggagagactcaatgcacagacttcttgagcgagggcagtaagctttgtctcctgcaaagacatttgtctctgaatgtggtttccttttgtttcatgcttgtgagtgtgtgcttgtgtttgtcaattgagaatcagcaacgaagaggtgtaagagttgactgttccccagagtataagggcaagctgatagaaaatcagctttgggtattgatgataaacaagttaatcttctttgggtaatcttttgaaaagaatccttgctttatttatttatttttgctttttttcctgttgggaattatccgtgagtgaaataaaaatgcttagaagatggtcttagatttcagcctctagcttataaggattgaataaatgttttattactcatgagttaaaacataggctaattcaaaaagagtttactttaaagagcatgactctctaagaagatatttgattttatcttattggaatactaggatgtggagaaacaatgataatatgtgtgtttttaagtgtgcttagagtgataacatcacctatgcaatatacgtttctagaaaagataattcacagatccattcgtgacaaaaattcatataaagggccatcacacttttaaaaaaatggagggactatttgaaatgcaaaatgattttgcctactatagtttaacattaaagaaaaaaataaaattaacctatttgtttaaaaaaatagtatataagtaaaaggcaaacaaaacctcaaagatcatcgtttcaaaactatactgagatgcaggatgatcttatgtatcattatttagtaagaccaagcagggattggttgattcgttggctgcttaggaatcataaacctctgcttttagtcgattatagtacagtaggaagtgggttgaatcaaaaacaatatttctaactccaggatatttcaagttcggtttggtttcttttctttctttctttttttttttttttaactttagaagtaccatgagccaagaaaggtagtgtccccaggccatcattttccttcctctaaattcacattactgaatttttccccccttggactctgaaacataatcaggggaattggcaggtttgggttttcattttcacctccggctaaatctgtcaacctgtgatgaggttggctgggcatcatcaggaagcgaactgttttcctatttgtagagtggaaacaagtaccagcgcttgcagcttccagtcattttgttattcatgttacatcatgttccttctgattgttaacatgacgatgtcactgtgtcttgagagatgttgggaaaagtaaaagggaattacagagtcctggaaagaaatctcccaaccatgtcttttgtatcaaaaagtgtctgctattagctgtgggggagctagatgtcactcccatcagaggatggttttctgtccctataaaattattcccgtgtctatacagagcatctcgatgtgtgcgtgctgcagaggtagggggtggcagagctttaagcccgtaataaacataactgtttcttaagaaagcttattttgccatcattcttcactcttctctgtccatttccaccttcccaatccaaacttgtcactttcaacacctattaattctccttcctcagtacctttaccatctattcctttttctttattttttttgtggatgccactcaagtttgggaagtaaaatcattctgagtaaatgcgtttcgcaggtttcccgttatcacattacacgcgttatatgtatcatttgatatcatctttacatcaatcccaggaagaaagaatgtgtgcctccactgtttaagatgaccttggcttacaaacgtaaaatgaccatggcaggtaggataatggtcctccaaactgtccacgtcctaatccccaggaaccatggatatgtcaccgcacatggccaaggaattttgcagatatgattaagttgaggaccttggattgaggaaaattaattatccagataggctcgatgtcatcccaagggtccttgaaagctgagcacttttccttgctctggtcagaggagagaagtgacagtggaagaatggtcagaaagatgctacttttctggttttgaatatggaggaaggggccatgggccatggactgttggtggccttttgaagctggaaaagttagggacatggatttttcccctacagctttcagaggaaacacagccctgcctgttgacaccatcatttcagtccagtaaaagacaagtcagacttttaatatacagaactgcaagataataaacgagtagttattttaagtaagtttaattaagtaagttagtggtaacatattctcctattttacagatgacaaaaccaaggtaactataaagattactttgttacaagtttagcatcaataggaaactaactcagtgacctccctgtaagatcacccagggagtaaacgtgtgtctgagctgtggtttggattcatacctctctaacattaaagagcagatgtcgttttcactaagtgtttcatcttctttatttcttacctagatccttgaagtcatttgatacctggtatctctccctagagttcctctcatttaaatccatcctactcatcactggtacattattcttcctagaacattgaaatgtttaactactttccgtgaccctgtggcctaacaaagaaacaaacagcatgtgtcggcctcctggttcctctctgaattacttccacttaagttgttgattcacctacactctagcaaagctggaaaatttttgttgtcctccttccaccatgcacttttccatccaaacacatttttttttttttactgtttcttccacctgaatgtgtttccctttaaccaacacctagttgaaatgcctactatatactccaagtcagagtaatgtctttatcttctgatctgtttcaacccacctctggtatcaacatcatcatcatgatcattgtcactatcagtactatcactaccatcatcatcaacattatcttcatccactaccatcaccaccatcatcatcaccatcctcatccattactatcaccaccatcattatcagcatcatcttcatagtactaccatcaccaccattattatcaacatcatccccatccactaccatcaccggcatcattatcaccatcgttctcctccactaccatcacaaccatcatcatcaacatcatccccatccactaccatcaccaccatcattatcaccatcatcctcctctactaccatcacaaccatcatcatcatcctcatcctcccccaccatcaccatcatcatcaccatcatcctcctccactagcatcaccaccatcatcatcaccatcatccgcatccgctaccatcaccaccatcatcatcaccgtcatcctcctccactaccatcaccaccatcatcatcatcctcatccactaacatcaccaccgtcattagcaacatcatcttcctccactaccaacaccaccatcatcaccatcatccgtctccactagcatcaccgccatcatcatcaacatcatcctactccactagaatcaccatccccatccactaccatcaccactatcattatcaacatcctccttcactaccatcaccaccatcatcatcaccatcatcctcctccactaccatcaccaccatcatcatcatcctcatccactaacatcaccaccatcattagcaacatcatcttcctccactgccatcaccaccatcatcatcgtcatcatcctccactaccatcaccaccatcatcatcaacacatttttattcactaccatcaccaccacaatcatcatcatcatcctcatctgctaccatcaccaccatcatcatcaccatcatcctcctccactaccatcaccaccatcatcctcatcctcatccactaacatcaccaccatcattagcaacatcatcttcctccgctgccatcaccaccaccatcatcatcatcattctccactaccatcaccaccatcatccttattcagcaattctttagtgttcacagagtgccatatacaatgttggatcctttatgagaatcatctaattgactgtttacccatatgaagtagacactattatttctcctattttacagatgacaaaaccaaggtaactataaagattactttgttacaagtttagttttctattgtaatataggcatgtgtttgtcatatgtcactactcagatgctgaaatgtttgaaacaaatttcaataattcaacacccaggtttggagaagagtttcatcttttgtttaacctcatcatgactctgccaactgttggagttttccttgttcctgctaaataatccctttagggcaacttctattgcatattgtcagtattccacccattgtgcgattctccaattttgttaaattagagaggaggttggtgtgtgagtcaatttttctgtcttatttatcttgacaaacaatttaagagattatctggcatttggagttggcggagattaattatgtagattatatccacagttctcatccaaattccactataaacacaagaagaaaaaactggttggtcttaccatgtgaacatttcattttggatataaagagggaaatgaaaatgttgatgatccaaacctgcctgacccaaggaaattcctaagtgttttagttacatgtccttgaagttgtttctttacacattttgttcactgagggcctctttactggcttgggtgcaggaactcagtctcatgtttgccatcccaaagttctgccttacactgtgttggtcttatcatggccattgtttttccacatggtagcaagatggccaccaggagccaccagctctatcatatcctcccagcaactccattggtaataggtataaaaatgaattccagcattgcctctcatttaactaattcagggcaagggcttttccgtgcatcagtcactgtgacggaacacagtgattggacagacctggtctagagtccagccccggagccctgggaaccacacggcaacacacagaagacagcatgcgtggtaaacaggactaacacttgtcagatctcgggggaaaggatgttgcatagttcagtaccacaggtgtcactgtaggtgaagggaaaaaaatgacacatagacattctaaaagctgcatttcatattaaatcagccaggctttgatgcatatggagaagaacttttagatgaatgctatttcagaaagcccttgtcccagtgaatattactgtgtgtaaaaaggaaaaaaaacaatggccgggcgcagtagctcatgcctgaaatcccagcactttgggaggccaaggcggttgggtcgcctgatgtcaggagtttgagaccagcttggccaacagggtgaaactccgtctctactgaaaataaaaaattagctgggcgtggtggtgagtgcctgtaataggtactcaggaggctgaggcaggagaatcgcttgaacccaacaggtagaggttgcaattacctgagattgcgccgcttcactccagcctgagagtaagagagaaactctgtcaaaaaaaaaaaaaaaaaaaaaaaaggaaaggaagggaaaggaaaggaaaagaaaatgacataattaaatgtatctggtcactgttggattaaacaagtttctttaagatttcttggagcccttaagtggccgacgcgcctattatgaatgtttcaagtatgagatatagaatgatgagcactctcaatatattttcacttggaatcttctttagggagaatatattgtaaaagacgatcatagtgtccggcctattgttagtactccatagatatttgtcaagaaagtgaatgactgtcacttattttggaaaatatagttcaagaatcatgaatcctctctgtacttcttgtagcaaaagtaaataacagttctttgatatcttcattgtcatgtcctgttttgtttgttggttttgttttccctgctggaaatccaggtggctcaggatgaacatctccatatggccgtgaatctatgggaggaaattgcatatggtgaaaatagtggacaactgactgttccttttataaccacattgcaataagcttttaaagagatgtacagacatacacacactgatctgatttctacagcgtatccacttaaactggcaaagacgtttaccttgcttgaggcaattgttgtatctagaaaactgtgaaaattgaattaaattacaggtagaatacactggggagctcattactaaatggatcctatactgcgtgtttttgtagaatgaggaattatttcataaaaggaataatactctctagttgatataataaatatgcttaaattgaggtatacaatatctgtttgtaccactattacaggcacataattgtcatttatttaaacttatctccaaactaagtgaaatatctctgactttttcttagaagttttctttggaaaaaaaaatttagactagcactttctttataatatgcagtgagtcttgttttatattgaaacctcaattcattttcttcctagtgaaaaatgctttttcatcccctctgaaataaatataatctttgaaattggagtcgatgtaaatccagaggtaatgagattcagtttttcattgtagccgaattagatggagaacttcaaatatttatttgaggtttaattcgagtaatttaggaaaacattgagctttctcattcataaatgataattacgtctcttcatcaaatattatactatattcccttctgctatctgtacagtctccttcagatatgaacagttttatatctcaaaggagattttttttttccatgtaacttccttggcttgtttaacttacaaaacctttcgaaatgcagtttgctgtgcctgtgtttggagtgtttagttttgtagaaaaaaagaggtgagaagtagaataacatttacattgattttcttcaaggttgtgctctactgagaaatagtattttgtcttactaaagcacatgtttaagaaatggagattgctgtcttgcaaaacccccaatataaactccagcaggctaaaatgcctgtagcctctagttgattataattctgtaccaaatcaaaagtgactgcatttaaaaacttccataaagaaaagcttagacatttcaaactaatgcttggccaatgcaaaattatttattccttccccttcagaatttcttctggggaaagccaaagaaaaatcatatgaattgcttgaagatattcagggattgactagagaaatagggcctctaccttggtggtgatgatgttatatattataatatgtatatatggtatagtggtcactgtagtggtagctgcagtagtggaccaggtttttaaattttctgcatcttaagtccttttccacccactgtagtcatggtacttgactttggtcactaagcttgccagaggaagtcatattaagtattccaccagccagggatcctttgggtgcaagcaacagaaacccaattcaaactaccttcaacataaaagggaaatatactggctcataggaaacagcccacggtgagactgacttcaggaattaaggaatccaaaaactaaatgatgtacagaatctaatatctccttataaatctgctttccattgtgtgatcacatggtccattctcactggagcagcttgagtcaaaggcttatcctggaactggtttctgtgttggtggatggaatgatgatgtgggagcaccaagccaaggttatttgctcacctctggattaaaaggggaagaaaaccccatggcgaacaaatgaagtttgggatgatccttccccaaagaaacaggctgttgtccaaaaaaggaaggaaaacagatactgagcaaaccagatcaacagaagacccaaccttggtattggaagtccatatctctacatggcccacctttagccttctccagggacaccagatctgcccagacagtagaagaacaattgtaatcaagggtaggatgtggccagaagaccaaaagtctctttttttaaaacatctgttctattaaggaaccaaccagagagttgattggtctatggtatgtacttatgtcttaactgatcaaacttattatcctcctcagtaattaaactaactagaattgtctcttgtcccactgcacactgtctgtgaatttggagttatttcaactgtttggaaatcataaaatatgcattttgttactcatgaattaagagctagaaaccagaaatccacttatatttcttccacctcccttaaaattttactttccctcgtgctccaatttgacaattagatcatgtaaatatcattatgtaaaataatacagcattaagatgtccacagaagatatggggggtaatctatttgtacatctaaaccagtccatttttctaagatatatgaggatgtgggaaagtctgcattgatcttcaagtgcaaatttttaagagaacacaatggatggtttagctacaaaaactagagattcttaagtaagaccattcttgtgaagttctcctgtggccgccataacgcaaatcaatcctgtcattatctcttcctgggctgggccctgtctttccccatgagcgcttaactctttcttttgtctcttcaaatttttgtttgctcttctgaagtcatcatcgtcaattagtatttgccagagccccacagggtctaacatgccacttctccatctgttattcaccgaggcagacgtggtgggaccaccccttttaggttagaatcacattattctatgctattttcagcatctcccacctgctgtcctccaagccgttctcaaatcccacatctttgttctgccctgttttcctcccccacggtttgactttctaagcattatgcaatggtgagaaatgtgaatcccttatagtgatatggaattccatgtcccccaccttctagttaatatgaccttggagggtttttggattctttgtgatattttcccccttattcataaaagaggcatattgaatgtgtccatagcgtacgaagactctagaacaaggggtgatgattgtgaaaatgagcttaaagctagagaatgtggcgttgttcttggtacacattaggtactaaaaatgggtgtttctgttattaccttagggattcaagtaggcaggcaagtgacaatcataaccagcatgcagccatcatcagtataagaaacagcgtcttcaacccatttgaagtgccacccaggcacccctgtcatgtcagtttttaaaccatttttatcagtatgcaaggcagcatatggactactgttctgggaccaccttagccttgaactctcttcacgttcactgttgtgaggctttgccttcatagttatcctccctatgttacttttttttttttttttaaagtgactttcaggatcagtgactaaaataaggttctctgtaacagtcataataagcaggtattttttatgcaaaagtggtgtctttcagagtccagaccatgctgcgtgtctttgaaggagaagcctgcatttaaaagccaagccattttgacaatattaattcagttaatttcagcacattatataatgtgtccagtgacctatcaacgctgactggttgggcactccagtaacaaacaccaaagcgagtgatatgtcataacagacaaatgggctctttaaactgtacgacgggaagagtgtttttgttggcatgaatactcatctgtcaaccagcccctgccctgttctgatgatggacaaggcattgggttaacacagaaggacataaaatgaatgatcaggcatggccgttgccttgaaggagtttatgatcaaggtgggataatgaggcataaggacatgaacacatgcaggcacggtgaagaaaaactcatgatggttgtatgtagataagtgtcaaatgaggggtctgggcactaaggatagctattctgccacaagtccttcaatttgggcccaaaggtaatgttaaatttgtggacaggtacacattgttttgagttattgcatcaaaacataatttgccctggtatgtggatgagctagctgacatacatgttttcagggtatcttttccttctcttacgattggcaagaaaaagcttaaaacctctctctcatcaaatactctcccccactcaccgtagcatccctgaataaaccaggtgggtacctggaaattgtagaggcattcccctaaggtgatgtatttgatcatcagagccagagtcgggggacttactcaatttttcacccagagaggaacgtgagaagtgtaccatgcactgtcctttcctgatctcagggcttcctctcaatagctgaacccaaggcttgttgaaatgaaatgaaaaataacagtataacatgcttacataaatttttaaaacatcagcaccataggcaaggttaaaacaaaaaaaaaaagaattttgaccaggtgtcatgtctcacatctgtaatctcagcactttgggaggccgaagcaggcggatcacctgaggtcaggagttggagaccagcctagccaacatggtgaaaccctgtctctactaaaatacaaaaaatcagctgggtgaggtggtgggtgcctgtaatctcagctattcaggaggctgaggcaagagaattgcttgaacccgggaggcagaggttgcagtgagctgagatcgcaccactgcactccagcctgggcaacaaaaacgaaacttcatctcaaaaaataataataataataattttttaaaaattaccataagtagattcgtgaaaccgagtcacctggtaagacagactttcttgaaactcaaaatttcattactacatttaccatgttatctatggcatatcccagcaagtaattaaaagtagtggttcatgacatatagaatttatctagtaatgaaaacttgcactaggagtgtttttaatgctccaaatatcctctttacccaatttgctagtcacgtcctcggactacttaaccattgttcgaggttgggttcacagataatcagaaggcattgggggtaccagatgcttatgagggatccataccagtaaaagaaaggagtagagagcagagttgggcagaggggggggtgagtcagactatgatgtgagcctggaaagcctcagctgacccattggggagctccagaggtgaagagtttatcagtgtctctgtgtgtgtatgtgtgtgtgtgtgtgtgtgtgtttgtcttgggctgaaatggctgggactttacctcctacctctctcagtcattggatgcaagttgccccaggaagggtgtgatccttgagcaaggaggctctctgcagctgacgcaggccctgaaggggctgacagctgtggctgcctgctgacgtcaccccctgcagctgggtacgggtatttgtgagatgcatctccctgtttaccatcatcttactgactccacaaagtgggaagacatctgcattagtctgttttacattgctgtaaaggaatacctgagattgcataatttttaaagaagaaaggtttatttgactcttagttatgtaggttgtacaagcatggcaccagcatttgctcagcttctggtgaggcctcaggaagcttctatttctggtggaaggtgaagggggagcaggagtgtcacatggtgagagaggaggaggtgccaggctctttataaaaatcacataaaggcgtacgtacacctgtgttcattacccagcactattcataatagcaaagacatggaatcaacctgaatgcccatcagcagtagactggattttaaaaatgtggcacatgtacaccatggaatattatgcagccagaaaaagaatgaaatcgtgtcctttgcagcaacatggatggaactggagtccagtattctaagcaaactaacataggaacagaaaagcaaatactgtgttctcacttataaatgcgatctaaacactgagtacacacggacacaaagggacaacagacaccggggcctgcttgaggatggagggtgggaggagggtgaggctcaaaaactacctgttgggtactatgcttattacctgggtgacaaaataatctgtacaccatacccttgcaacatacaatttacctgtataacaaacctgcacatgtacccctgaatctaaaataaaagtttaaaaaattagacctcgtggtaaatcactcattacagcagggacggaaccaagccgttcataagggatctgctctaccatgatccagacacctcccagtagacccacctccaacactggagatcacatttcaacatgagatatggatgggacaaatatccaaattatcggccagccgtggtggctcatgcctgtaaacccagtactttggaaggccgaggcaggcagattacctgaggtaaggagttcaagaccagactggccaacatggtgaaactccatctctactaaaaatacaaaaatctgcctggcgtgctggcatatgcctgtaatcccagctacttgggaggctgaggcaggagaattgcttgagcccgggaggcagaggctacagtgagccaagattgtgccattgcactccagtctgggtgacagagcgagagtccatctcaaaaaaaaaaaacaaaaatccaaattatatcaacattctattccttcccaaaaagttctgctgaagactaaatgaggtcatacttctaagatacccagcccagtgactggtgagaataattgctcaataaaatcctgtacggcagatactgttctctctctggtttttgttttagtctttagattttttaaattatttttttgttatggtaaaatagacataacataaaatgtaccaccttagccattttaaatgtagagttcagtggcattaaatacattcacattgttgtgcgaccatcaccaccatctgtctccagaactttatcttccaaatggaaactttgtacctatgagacattaactccccattctcatgtcctcccagcctctggccaccagcattctgctttctgtccctatggattcgatgttctaggtacgttatctaagtggaatcatatggcccttgtcctttggtatctggcctatctcacttgcctcaaggtttatgttgtagtgtgttattcttatttccttcgtttttaaggctgaataatatttcattgtgagaatatatcatgttttgttttgttatatcatgttttgttcatttctctgttgatagacatttgggttgtttccacctgttggctactgtaaataatgcttctattaattacttattattatttattattattacagagctgttaatttcatttcatagataagaaagtggctgggagtggtagcttacacctgtgatccagcacttagggaggctgaggcaggaggtttgcttgagcccaggggtttgaggccagcctaggcaacatagtgagaccccatctctacagaaaatataaaaaatattagccaggtatcgtggtacatgcctgtagtcctagatgctggggaggctgagatgggaggattgcttgagctcagcagttcaaggcagcctaggcaacatactgtgaccctgcctctaaaataaaaataaaaaaagcctggtgtggtgttgcacacctgtagttctgacttgggaggctgaggtgggaggatcacttgagcctgagaagttgaggctgcagtgagccatagctgagccactgcactccagcctggatgacacagttagacccagtttcaaaagaaaaaaaagaaaagaaaaaagaaagtggctctgagagttcaaggacaagaccagcaactgaatccacatctgtccaacccagattccaagctgctgactgccatctgggtggcttcccctctctgacaaggatagccagcaactctgaaaagcaacttactctgttacacctgaggctacagcagactcctcctatctcatagaaaagaggcctcagcttcccagcctccagcaaagggaattttctaggtcccagtccccctgctttgattttaaccctctctgtgtctctctcctctgacttctacttccttgctctccatctaattccccctcctcctcgagctctttgaagttgagggagtctatactgccaggcactatccttgctcttctaatttcttaattcatttcaccttcctcctagccccatggggcaggcattgttattatcatccccatgttgtgtgtaaggaaatgggtcatgcaggagttaaaaacctgcctaactttcacgcagctagtaagtggcagaactgcaaattgaacagccagtccctgctccacagagatatgcaatgctacctcttgagctaaaacagaaattcagaccccactttgtagacacaatggctcagatttaggagacgaccctgcagccaaacctagacaaacatgaggtggttctgctgtcctgagcttgctgctcaccgtctctgcccacatggctctagctgggctcaggactttcctcttcacagcaggctgaacagcaaacccagaggccattgcagctgcctcggtattctacaccccccttgggtctggaagttgttggaggcaggcataccagactgtttataatatggatgctttctccttcacctagctggagccaagaggggtgggggaagactgagagagacagagacagggagagagagagagcctgcctaactgcctatttatcccaaatccatatattattttggaacattcagtattgcagaaatacatggagggataaatcatttcttctgccatctggtctcggagaaccttcccaagaactgtagcttcgtttaattttgctgcgttcctttcccaccctctttgtgctttccatcatcttttcttggctgtatttttgggtttgttttgcttcagtttcttgctcttttagctgtttctggatttcaatttttaaaaagaaataacggatcgcacttatccaagtcgtgccagattctttatttgggataatgctacctcatggctattttttaactttaatccggaaccttggagtgacgtgtggatttttttttaatgccccaaccagatgcactaagcagcttgatggtcagtaatgaggcagcaccaggaccctgtggtcctagagtttcttggcagtgccttcatggcaaatgtttcagtgagatgagcgtggcagacccagcccagccattgctctatggttccaaagtccttttaaatgaacaaatgggttggcattcatctagtgggactgcaactccagtgaggttactcaaaacatactgggcaaaggtttctcactgtttgagtgggaggttacaagggaagaagtctagagcgatccatggcatgatggatgggggttggcatcagaatgaatcatgtttagcttaattgggacacagatggttaagtatagaaatacctacagacatacatacatccctgggttactgtacacatagatcttcttgttccgtcagtttagaggtcctggaagccacaaccccccagcagcaatgagcatgcctactacccagatctcagtttctaataccattctccaaaaagggaagaagggctccttggagaagcggctgcttttaggactcagctatgaaatatacaagatgagcctgatagcaaatattttacagtgcaagaaagcgctcacaacaacaacaaagccactgtgatagagtatgtcttataaatgagaaataaagagggataaaattataaattagggcctggcatggtggcttaagcctgtaatcccagcaatttgggagcccgaggcaggcagatcacttgagctcaggagtccaagaccatcctggctaacatggcaaaaccctgtctttactaaaaatacaaacattagctgggcatggtggtgcatgtctctagtcccaactactcaggaggctggtgtgggaggagcacttgagcctgggaggtggaggctacagtgagttaagatggtgccactgaactccagcctgggtgaaagagcaagactctgtcttaaaatatatacatatatagatagatataggttagatggacagaattgtggaccacctttcacgcctattaaaacccggatgcttagccccagtggctggctttgtacaggcattgtaatctttgttgtgtcagggtttgtgttgaaaactttttactgctcccgtgaataggtaagccctaaattcctctccttaggttcacaacagcagtggctttcctggtcgcccatgtcccagttttgatgatagggcaacttgaaactaaaagagtgaaaaataaatcacatttacgaggagaaaatggagtcattgcaactcaattattaatgtgcaaaactgttatgcaatgtagcagcccaattaataggtgtctcttggggaataatcaaggcttaatttggcatgataattagtagcctccccttccagctttggatggggggcccctgtaggacagcctgatggctggtaatgaggcaggatcacttactttgcagccgtgttaattgtatctttctgtgcatggggacaaaacagatttacctgtttctggatgctgggatgtgccattgctctaatagagttgtacttgtttcctggtcttgccaacactggcctttctgaagggcaacactgttacacttttgagacgtctttaattggctgagttgttctaatggctacagctgcagtcttttttttttttttttaatagagtgtgtggcagagttccaatcttacaagacatacggccagagctgacatattcttaggaataacagaaaattgtcctgtttagggtatctgtaataataggtgaccagaagtcatctggtgtaggtatctatctcctctatgtgtctcagagaactcctgttttttgcaatattgctagttgtttgtacaagctgtatagtcacttaaaagaaaaccatgaaaaattacaaacgtgtggtatttttactgacaaatgtggaacagcacagagaagaaaatagtatatcatctctaatgatccatcagccgagggataaccactgtcatcattttggtataatctctttccagacttccatgcacacacacatttctccccatatatatttaatccagatgtgatttctatttgcaaaaaggaaattgtaaggtgcatactattttgttaacatgtcgtttgatcataggaacagattttgaaccagatcaataccagcatttcctaaacggtcctcctccaatatttgggagctgctgatctgtgttctgaaagtgaggctgagacagacgcatttcctctcctcctctaggtaacacacaatgaacattcatatttcaaagtctttgtttacatgttaaaaacatcattttagggaaatcatacgttaacagctcctacaattgtcttccttaaactacatgtgggaaaatgctagtgaatatttagatggcttcccatttttgttttttttttttttttgctgttgtaaacatcactgcagtgaacatccttgtacatgcatcttggggcatttctaagatttccttagaatcaaccccaagaaggattgacagtcaatggacatactgaattgaagatgctggatctccttggatgaactgccgtctccagaaaggaagggcatgtacatttacaagcccaggagagtgataggagagtgcccttcctcccagtttctgctccatagcacatttttaattccagattctgcaactttagtagccgtgtaggagaccaaaagagaaagtttattaaattcttatttatgtgttcaatttgcatccgccttctccttccccaagctcaaagcgccacaaagaaaacattaagcttgtaactcttggatgtgctcctctgtgagagagggacttaggggaagattcagggaatggagttgaggaaatagtgcagaggtagaagcaggatgcattgtaaaagaaaacctagacatcaggtagtgctgtggagggtttcaaaaccttagtttcagaagaaaggcccttttccatcgtctttcccctggcttcccttttgaatggtagtagaagaagccacagtgaacagttggcatcttttgtttactacccacagacacctggcttggggagcgggggatgttgggggttatgacttttccccttgtttcttattaagccccctcctttgttgttgagtcctccctaaatggtcactcttatttattatgttgaaagtcattgtgtgggctaggatagtcccaaagcatttttgaacacacacacacacacactcacactcattcacaaaaatcactgtcttcccaactaccttgagaccatcttctgttttcttactttccatcattttttcctaaatcagacaggagttaagttctaaaattataggattttgtacctgtcatttttgtgaaaagtgttcctttctccacatgctgcccaatgagggtcctttaagatattttcatcacgttcctcttgctcttgtgttggacaatttcgcacaaatatgttttttgcccaatgatttaagatgctcttaattgcttttactgaagggaaatagaacaccttttaagccaacagctgagcgatttgctatgacaaatctgccactatgcattcacttaatttccaattaatcaaacattcaataaatcattagtataattacacctgttcccttcttgccctagcccattagctcaactcaggcgtcccttcgactggctgtggggaaggtgttcatttgtctgccctggctgggtgcacattcttactccctgtgagcttgagaaatgatgagtaagaaattgtaattatttcaggcaccagaagtttgcttggttttcctcttctctgcttcccactccattgcgtccccaacagcttaagccaacatcatagtggcctagtagcggtggctggttaatttcagcaagcttttcttttttttttaatcatttttattccctgactgtgcctctttgctaattacaccatctccccaggtgagcaataattccctcatcaccatatatctcaagcacagattattaaaataatacagcttatgtcatataaatgtaacagaaagtatcttaaagatgctttattgaaagctggtaaattggttcaacagatgaatgttttaaggcctgtttttaaaaggttgcacaagtataaacccactgaattactgctgcagtttcacacgagcggatgcaattattttaagcatctaactgtgcagaagacagatctgaaaggcaaggagctaaattctccgagattaattaaagggtttcattttgctcttgatttaaaaataaatttcaagcatgcatcacttgttattctgtggaagaatttgcattatggggtttaaaaaaatactgagaacgttaagtttcatgagttcttcatacaatatagctgacagctcttaaaaagaggggttgacctactgttgcagcagcattttctcctacatacttctttctacttttacatttgtgaagggtattaatcttcaaactcatttccaatgtaagattgtgcatttacatgaatctcccataagattgctcctgattcgatctatgcttattgatttaatttcttttacctctcagagccagtggtgctgaagggtttattgtaattacagtgttgcgggtttcggtggaacagttccctggtaacttaagtgtgggtttgattccctctaaactcgctcagcccaggagatactgcggcaagtatcttggaggcagagagctttcaggccagatcagaacgctggctggtacacaaccggaaggtatggggaggctggagagggaacggccgggggctactggccagatggatcgctgttctaacggggcccttttgaggtgaatcacttggcaattttgtgagttggcagacggcacagccacctgtgctcaatgtgaaatgagatacaggtaacctactgatctgaaatatgctgctcaccctttgagagatgggacagtgttgcaagaggtgatttgccctatttgtggggtattggggagggaaccacagcaaaaataccatgagttttgggactgaggggagtccaaatccaagccgtgtgtctctagaactgtagtttctaatttggtttaacttctcaaaactgaaatgtttgtcacttattttccttaacttctcaaagccaaattgttcctctgtaatagcattgtctagaagaacatgattaaagctgcatatgtacttttagttttttaatgactgcattttttaacagtaaaaataaacaggtgaaattaatgcattttatttaacccaaatatccaaagcatgatcatttcagcgtgtgatcaatataaaagatattttacattctttttttcatcctaattttttggaatttattgtgcgtttcatgctgacagtgcacctccatttaaactagccacattccaagtactcagaacctcaaaaggtgatggttactttatctaaaggtgcaggtctggctgatccgttaccggaatagtaccatttgcaactgaaagaagcctaattcaaatgagctacagcaagggaagaaaaattgtctcaagtatggctgaatccagaaacacacctgctgcagtttggaaattccccacatcaaggccctgcttgccctcgggtggcccattagatggcaggaaaatggcccttggcaaccccaagccttaggtggcccttaagtttgtgacctcaggaaatgagagatcctcttcccctgtaactgtagcaaaaacaaatttggtgaggaaaaggaggaaagggacaggcttcatttgtgccaagtgtctgagaagactccttctagaagacagggaggggatgatgggcaaatccatgaaggctacatgtaacgggagtgcaattccccaaagaagctctactgagcggaaaaatggcacatacccattgcaagtgaaatgatacaatctgccttaaaggttgtggtaaggattgcttaggccaaaactctggagtctttcttgacacttctgtttctcaaatatcatgcgtctaatccctgctgcaggaaatcatgttggctttagaatttatccagaattgtattgactgccaccatggggaccatcatcctgagcaggttctgtcttttcttgcctggattatcgcatcctcctcctaactctgctttcactgttttgtctccacacgcccctccccccatggcttctgtctcactgagaataaaagaaaaagtccttgaaatttttcacaaggtccccacattctggtccctaccaactttgtcatctggtatcttgtcctatctctcctgatatggtttgactctgtgtccccactcaaatctcatcttgaatggtaatccccacgtgtcaagggagggacctggtaggaggtgactgggtcatgctgttcttgtggtagagagtgagttctcacaacatatgatggtttaaaagtgtttggcagttctgccctcactctctgtctctcctgacaccatgtaagacatgccttacttccccttcgccttccaccatgattgtaagtttctcgaggcttccccatccgtgtggaactgtgaatcagttaaacttactttattaagtctcaggtatgtctctgtagcagtatgagaatggaccgatacactcctcactgagcccatcctgtctcaccactctcattctagacttcgttttctttcaagatctttgcattgtctatttcctctacctggagaaaccttccccaggtacccctaggtcttattcctacccaatttgaggtctttactcaaaaaccactgtttcagtgaggtattttatattgaaaattgccttctcctacatttcttgtctcccattcttcctttgtagctgtagcattttgtatagtatacgttttagtgattttgttatctcgctctctttctctgtctcacatatactatatggtaaagtccatcaggaaagatatttctgtgtggtgttacattcctctacctagaacagacttattagagaggcttaacaaatatttattgaatgaatgaatgatggaatgtagaggtgctcaatgaacagtagccatcatcattatttactatcagaggctgtttcagctatggtcagcaaggttaaaactcaaaatggaactctgctatgaacccttaagtgtcaatgccatcagtctacaaggtgttgcaaccttctgtcatctgggtctgccaaatacccatttgcgcatgtgtgcccgagaccacgttgttgaaatgttacgtctgtcctgggcgtgaactagataatctgcctaatgactgggccacagtaataggattttcagagttttactgtgtaccatcctaacctttcctctcatctcccgaggactattttctcccagttttttccatctcagtggatggtattatcatctttccagtgacacagggcatcatcttctgaaactcaacacccaagcttcagtccaatgtcatccatggcaagataatataatttaatcattcctttattcagaaaatgtttattaggtcctatcatggcgtaggcactctgataggcatggcagccaaaatgtctcctaagtatctctgaaaacatacccacttctccccacctcccctcctatcacctggcagctggactataaaatattccacttaccagttgatatggtttggctgtgtccccacccaaatttcatcttgaattgtagctctcatcaccctcatgtgtcatgggagggacccagtgggaggtaattgaatcatgggggtgtttttttttttttttttttttttttcctgtgctgttctcatgatagtgaataactctcatgggatctgatggttttataaagagcagttcccctgcacatgctctcttgcctgccgccatgtaagacctgcctttgctcctcctttgctttccaccatgattgtgaggcctccccagccatgtgaaaccatgagtctattaaacctcctttcctttataaattacccagtctcaggtatttcttacagcagtgtgtgagaatggactaatatgccaatcttttgttccctcccagtcttgcgtatcttccatccatcttctgcctagagccaggataatcttttccttctcacatgcaactctgaccatatcatacctgggtttttgtttgtttgtgtaataataacagtcccccattgctcacaggatagtctcaaagtctcacgggagtcttgatgaccaagttaatgccaacctccacatccccatctctcaccaaattctgtttaagctctaatctccagtctaagatttctcaaccttggtattgggacatttagagctgaataatgctgtgctgtaggggtctgtcctgtgcattgtaggatgttgaggagcatccctggcctctacccactagatgcaagtaaaaccccctccccagttgagacaaccacaaatctctccagatattttcaagtgtccctttgtgggcaaaaataaaaatccttcctttctccattgggaacaacagcttcaaacaaaattgaagttacagttgcccaaacatcccctgtcctcccttgtttttagacatttgcagaacctctcttcctctctctttccacatctacctccttagttatggctggcaactcctgctcacccttcatgtttcagttttgacaccaccttctggaaaagcttttttagacttctcccaggtagtagggtgatggcaagatccttggtaagacttggggactgatagcatgtggagaatttggacaggaagatatcatccttttctcagctgggttctgccagaagcagacctgaggcaataattcacatgaaagtagttgatacggttaggctttgtgtacccacgtaaatctcatcttgaattgtaatacccatgtgtggaggaagagaagtcattggattgtgggggtggtttcccccatgccattcttgtgatagtaagtgaattttcacaagatctaatggttttatgaatggtagtttttcctgcactctcacgctctctctctcacctgccaccatgtaagccatgcctgcctcaacttctgccaagattgtaggtttcctgaggcctctccagccatgcagaactgtgagtcaattaaacctctttcccatataaatgacccagtctcaggcatttcattatagtattgtgaaatcggaccaaaacagtggtttatttgggaggaaacactagtgttcatggtggtggtggtagaaaatggtgcaggggagaaaaggccacctgcagaatttattttgtgaagccactgaccactatatggaagtgaagctttatcccactacgggatccttggaaccaacgtacacacatagcttagtattatcctacccaagggcagggggcctggggtacttatactgcaagtctcattagtcattggtagaggggttctgcttttcctgctgcacaggtaggaaatgtgatttcagcatcaagaagaaatgcaggtattgaagatgaacatattacagccaggtccatgtgcactgatatcataaaggtgtaggtaaattggtggggccctggagtgcctcacgtggtggcttcaaggtgttgcatctacacagctgggacatgggcagtaccgttttctaaacagtgcaatttgttaggaggagaaactggcttatttctttgaaccacctgtgctacatccataagaggctgcgtttgaggttctgtttgggaggcagaaaaaagtctctagaaggcacctggaaataaggaagctaaaagtggagacagattggagctgaagacttaagttgtagaggcaccttgaaggaattgtggttaagcctcgaagatgggtaaggtggtcacaggagttggaggtctaggaaggaggggtaactgcagagaaatccatatttgggattagttttgttccttctcctaaagtctgtgtgcggcagcagggagtggtgaatacagtcaagatttgccacttgggactaagccacagtgtttccaaataaagactttaagaaaccctcctcactcataatgaatttaagggctaaaccttatcagtcacacacacagaacaatgaatctttccctgaggcaatgcaggataaagttttaaagttttttttttttctttttttaaccctgttctgttgaattatcttcaaaactgccttagattctgggaccagggtgcggagggacagatggggtgagtgattttgaatgctgcagctttatcttgctgcattataaatatgtgatgccatttaacatagcaagccatcaggttagtaaacaaatgattgccaagtttataattggcaaggaaggaggttataatctataaggagctttgtgtcccaaccaatttattctctaacggaactttattgcctccatcgctgaaaactcccgaagagtcttaagagctaagaatccagattggctgagctagttttctcttgtggtctcctttctggcctcatctcctatccggataaagatacttggaaaacccatttcttgaagatgaagcagcccacctggcccagaaatgcctggtttgttgtttatgggtggtttttatccagtgaattggcaagaagtgaattatgtggaagaatccattttaaaccctttcagctacacaaaattggaaaataaaatattgtgtttcttgagatcatgaaccaatactgtctgggtttcttagggtatgaagcccctttggggtcaaggctcagcctgctactattacagcctcataccctgcttctctcttcctagtatgatgattaagtcaaggatacgacgcaattgaccaggtgtgcagtgcccaactctgtggggccattaacttcacagcctacataaagaagccacttacggttttgtgagctcacactgctcagttgtacatgatggccctggtgacaatatgtgtttttggaattagattggcctgaggcaaattctacagaaaaatagagggaacttagataggttgctttatttgtaaaatagagggttataatacctttctaataatgttgtttacaaaaatgatgcaagaaattgcttctcttagtatgtatttcccctttgcctggattacttaccacaaagccatcgttgcttttcataaacaacttccgatcccttctgtggggtattttccatgaccttccctcttgctccctcatctttgctgtctctgaatataggtatctaactggaaggctggaagtgccatttcaaagcggtggaatttttttttcttcatttgttgttttattttgctttattgcattttccatatttttggctaaatctgttattacctgcccatttcagcaactaaaatctgtttgctttcttgtttacctgcatagaacttactcttccatcttcttggaatggaacttgtctcagaatctttcaggcgattgcctgagtccttcttacagacaggactaacactccccttggaccccaggtatctgcccatgactcagtcttgttcattcagcattttccattcctctggccttgatgtttggttcaccagtgggcatgtaacccaattctatccagttatacttgtgttgggaagggattttttttttccctggggttgtgaaagtaacaggatataagtttgggacagctgatggccgtgttgacattatgtgagtgtaataaactgaatgtttgtatccttccaaaatccatacatggaaatcctaactcccaatgtgatggtattaggaggtggggtctttggaaggccattatatcactagagtggagccctcacaaatgggattagtgcccttataagaagagacagaagagcttgctttctctcttttctctcaaccatgtgaggatacagtgagaaggctgccatgtgcaaaccaagagttcccttcccacacaccaatctgtcagtggattgatcctgggattcctagactctagaaccgtgagaaataaatgtgtgtttaagatgcacggtctatggtattgtgttacagcaactcgactaaaatggtggggaaagccagtgtgaatgcaaagcaaactgttaaaaaaaaaagatacccatttctgacattatttgagtgtcagacttgcatctaattgagccgcaagccttgaacttatcagctttgtgataaatctccccttttttgtgtataaggtagttcaagatgtattactcaactgtgcatcttcctacagagtcttttctactacagcataagaaacttgagagcagaatggtggatctgcatgacacgttttggcacttgttacgttaaactcaaaaactccaaacttggaggtttagaagcagagatttaacaaccaaaaattgtgcatagtcaacctgatgaattaagatagcctgtgagcctgagatgctgaagtcttttttttttttttacccagaaatacggtgattttttacatgtcacatcctggatcgactctctgtcagctcagcaagtgtcttcagagctgacaagtgataaaccagttgaaagtgccagtcacattgtttggttattgataatgctgctgtaccagggatgtgtcattagtatgtgtttacgggctgcaattctcaacatggacccagcagaaaatattgggtacttcaggcattcttgttatttacccagatggtgtttcgtgggataccccctgcctagagcagatctggatatgtgtctacactggttccaaggatcctatactgggataaagcttcagttccacatagtggtcagtggcttcacaaaataaattctgtaggtggccttctctcccctgcaccattttctaccaccaccaccgtcatcaccaccatcatcactggtgtttcatcccaaataaacaggtgcatttctttgtctaattttagagccagtggctacttcttacccatctggtgggtattttttacagaagacctgatcactgagttccttgcaaagatgtccccatcttttgcttccattgtctcatcagtagaaactcacaacatgaaataataacagcaattaatgtttatatattggtcttttccatatggtaggtatgttggcactattccacgtgctggggttggagtggtgaatggaacagacgtgcccttgtctttagtaaatacactacaacttgtatattttagtgggagagatagatgataaggaagtaactctagctgaaaaatataattacaagttttgaaaagtggtgtaaggaagtccacaaggtaatgcgagtaagagtaattgatgatggtgataggtgttcacggttggacagagtcttgagaacaattagttccaaagtgaaaccacctttaaggaggcagcattttcgtggagacctgacatggtttggatttgtgtccccgcccaaatctcatgttaagttgtaatccccaatattggaggaggagcctggtgggaggcaattcgatcatgggaacggacttcccccttgctgtttttgtgatagtgagtgaggtctcacaagatctggttgttgaaaagtgtgtaccactcactgaaggtaaccatagtaacagcaaaatcccaaatgagttaaactcacaactaggttgactccagtctccgcataaacacactggcagaagagatgtgcatgtttctttctttttttcttatctttttttttgttgttgttgcttgttttttgagacagagtcttgtactgttgcctaggctggagtgcagtggcatgatctcagcttgctgcagcttcaacctccggggctcaaacaatcctcccacctcagcttcccaagtagcttctgggactacaggtgtatttcaacgtgcctggctaaatttttatattttttgtacagatgagactttgccatgttgcccaggctggtcttgaactcctgggctcaagggatttacttgccttgatctcccaaagtggtgggattataggcatgagccatagtgcctggctgagatgtgtacatatttctatgcaaaaatgctattgacttcagtcttcactactttccttcatagtattcaatattaaatagtatttaaatagaaatactaggattcaatattcaacagaaaaaaagaggaaaaaatagcccacttagacaaagcaatcacatcaattaaactcagaaaagaccccagtgttaaaattatcagggaataaatttaaaataactattactaatagtttaaaagttttaaagcatagtttcctcatcttcaaaataacctgtttttttttttttgagacagagtcttgctctgtcacccaggatggggtgcagtggcatgatcttggctcactgttagctccacctcctgggttcatgccattcttctgcctcagcctctggagtagctgggactacaggtgcccatcaccacgcccggctaattttttttttttgtatttttagtagagatggggtttcaccatgttagctaggatggtcttgatctcctgaccttgtgatccacccaccttggcctcccaaagtgatgggattacaggcgtgagccaccgcacttggccaaaatgatggttttttaaagtgccaaattcttctggttattgtgcatattaaatgacataatggagcccgggcatggctgctcacacctgtaatctcagcactttgggaagcctgggcgggcggatcacctgaggtcaggagttcgagaccagcctggccatcatggtgaaaacccatctctactaaaaatacaagaaattagccgggggtgatggcaggcgtctataatcccagctacctgggaggctgaggcaggagaatcgcttgaacctgggaggcagaggttgcagtgagccaagatcatgccactgcactacaccctgggcgacagtgtgagactccatctgaaaagaataaaataaataaataaataaataacaaaatgttagtaaagtgcatgcttagcaaaatatctgacacagggtaaggatttagtaaatgacagtaattgtagtccttatcaccttggatacttaatgaaatactgctgaatgttcaagaaaaaaaaaagtgtgtacttcttcccccttcactctttttctcctgtttctgctacgtaagacatgccagcttcccttttgccttctgccctaattgaaagtttcctcagtcttcctagccatgctacctttacagactgcagaactgtgaaccatgtaaatctctttctttataaattacccactctcaggtagttctttatagcattgcaagaatggactcatacacgacctatgtgttcaagaggagccagccagggataattcaggaaagggtgttacaggcagcaggaacagcaaaggcagaggccctgagctggaaggagcatggtatgatggagaaacagaagtgagaggggtgctgctggagaatagttggggagaaagagacgtgtcgggagaatagttggtgagaaggagacatgtgtcaggaagagctagagagaccagggtggtgggtcagctgggacacacatgaatgattggaaacatgagcttcatttctgagtgtgccaccttttttattcttcaaataggtgataaagtaggtacttctgaaggattaaggatgttgctgaagtgtatcccacaagtgaatatcagaaccatgattcattccctctctttgcacaatccatccattttaccttaacatgatgctaccatgttattaattggttttgaagctccaggtacattaatactgggacagtattaattcctacttaacataaggatcatgagggctaagatgaggtcacgaatatgcagcttttatgctggtggtcaggcatagtctgttcacaataaacagtagaatattgcctcttctgatagctcagtgtttgctttatgtaaccattttaaaaaatgtaattgtggtaaagtacacgtaacataaaacatatcatgttggccgggcacggtggctcactcctataatcccagtactttggaaggccaaggcaggtggatcacctgaggtcaggattttgagaccagtctggccaacatggtaaaaccctgtctgtactaaaactacaaaaattagctgggcatggtggcgggtgcctgtaatcccaactacttgggaggccaaggcaagggaatcacttgaacccgggaggcggaggttacagtgagccgagatcatgccactgcactccagcctgggggacagagcgagactctgtctcaaaaacaacaacaacaaaaccgtgttaaccatttttaagtgtacagttctgtaatgttaaatgcattcatatttttgtataaccaatctgcagaactttttcatcttgtaagatggaagctttatgtttgttaaataacagctccccattctccttaccctccagctcctggcaaccaccattccactttccctctttgtgaattcctattctagctacctcatacatgagtagaatcacacagcgtttgtctttttgtgactgtcttatttaattcattaatgtatttgtttaattaattaattaattaattttttgacccaggcactggccctgcagctgcttccttttgggcgtggaaattcccactcatttcagggatcacgctcacacgcctattgcaggagtattagtaagcaccccccaccagcccacattatccccccaaaataacgagacctcacctggcctctgcatttccacatccctgctcaaagccaaatccattcctgctccctcgccctgtcctaaggttcatctgtattacagcatgtatcaaaatttccttcctatttaaggttaaatggtatttcctcctatgtatctactgatgaacgcttggattgctttcacctttgggctattatgaataatactggtataagcgcggttgcacagatatctctctgggaccctgctttccattcctgtggtacatacccaaaaatggaattaccagatcatgtgatatttctagttttaagttttgaaggaaccactatcctgttttccaagaggctaaaccgttttgcatttccacccacagtgcctaagagtttccacttctccacagcctcgccaacttttgttattttctgtttttgtttgcttgtttgttttggcggtagcctttctaacaggtgtgaggaggttgctctaagtcatcttggtcatgtccttaggaagtatattatttgcagagcagctggaaacatctcattctcttccatccactcctttctgatgaaagcggcatattccattgatggaatatttaccatgtagataaatacttggcattttgccaagtcattttgtatactcagtaccatgtttgtgtgatattaatgagaacctacagacttctttagaataatcaaggggtccttaagtttctgtcttgtgtacttgaaaatatccaactggaaaccatttaaatatggctaaaattctgtgtctctcttgcagttgcacaacccataattaaatgatttgtagaagcagtctgaattaagggccccgttcatcaatactacatgaattatgtaggcatatcttcatttttacattatttatctcagcggccagatgggtacattggctgcaatattcatcagtaagaaatccaaatgtagctttggcacactgacatctgtgcctggtctggccccccgtggggtagagtgaatatttgtggttggggactagggggccctctgcttctaggcaagtcaggagttctgcaagtgatggtatttgacactttatcagtcacctcctaagtagctcccatcagagataagtggaaaggatctgagagctacccaggctttggggaggggatgggcaatgtcccatgagtggtgatgtggacaccagagttttcacaacgtgtttgtcttggttgctgatgctctgtaaaactcagtagtagctaatatttaggaaggcagtgtaatatagtggataaaagtgtgggcattggggtttacattgtggctttcccactaatactgtgagactttgggcaagcagtttcttcgtgtttcttacctggacaatcatttaatataggcacctactgtatcagagtggtcgtgagaattcaccgagcataggcaggttataacattgagtatagcatgcaactgtggattaaaaagataaagacttaaagataccactatggagttatctcaaagatacattattggtgaacacacaaaagggcataatgttatgtattatagttttgatctgggtagaaaaaataatacaattatagattgtgtttgtatgtgcataacatttctggaaggttctaacacaagtcattggtttactttggagaagtggatggcagtaggggatatcttgagtgagccctgttgtatattgtgatctttgttttaattttacgatttgcatatattagtatttttgaggagcaaatagtctgattttgaaaacaaggaatgagttacagaaagctgcatctgtctcgtgaagattttttttttctttgcagttagacaggaacctggtgatgaggctcccctagacttctggagagtcttccagctacgtactcaagatcttagcttactgacctgtatgttctgcacgaggttctcaccattgtttccagctccacaccctggccagatacagagcactcacccagtcatgatccatcaggaaaataggaagttggaagtgggctccaccttggcccattgctgagggcaagtaggattttcacttaaccgtttgggagaagtggatatttgcctctactatggtctgaatatttgtgtaccctgaacatttatatgaaatatttataccccgggtgatagtattaggaggtgatgaggccatggtggcagggacttcatgaatgggattagtgccattataaaagaggctttacagacctccttgccttgttgtcctgatatgaggacggcgagaaggcatcttccattttttttttttttttttgagttggagtttcactcttgtcacccatgctggtgtgcagtggtgcaatctctgctgactgtaacctctgcctcctggcttcaagcagttctcttgcctcagcctccccagttggtgggattacaggtgcactccagcatgcccagcaaatttttatatttttagtagagacaggtttcaccatgttgccaggctggtctcgaactcctgacctcaggtgatccacccacctcgtcctcccaaagtgctgggattaaaggcattagccaccacacctggctgccatcttctgtggacgaggaagcaggccctcaccagacaccaaatctaccaggatcttgatcttggacttcccggcctccagaactataagaaaataaatttctgttatttagaagccacccagtctgtggaattttgttatagcagcccgaatagactaagactgcctcaaagtcaacatttaagagttcagattagaccatatagggtaacttttttttttaattttaatttttattctaagttctggggtacacttgcagaatgtgcaggtttgttacataagtaaatgtgtaccattgtgatttgcttcacctatcaacccatcacctaggtgtgcattagttatttttcctaatgctctgcctcccccaaagccatatagggtaacttcctgaccttgctgtagcatttgtaaactgtcatggcagtagtgggagtgtcttttggcatgcaaatgcattacaaatagtgtataatgagtaatggggacagccaggagtcacttttgttgccctcttggttttggctagctttttttttttttttcttttttttttgagacaaagtcttgctctgtcgcccttgctggagtgcagtggtgcgatctcggctcactgcaagctctgcgtcccgggttcacgccattctcctgcctcagcctcccgagtaactgggactgcaggcacccgccaccatgcccagctaatttttttgtatttttagtagggacagggtttcaccgtgttagccaggatggtctggatctcctgacctcgtgatccacccacctcggcctcccaaagtgctgggattacaggtttgagccaccgcgcccggccggttttggctagctttttaaggcatctttttaccaacgaggtctttgtgacctgtacctggtgccgaccatctgtcacatcctgtgactcacaatccccaacctaccgtgaatgcagcccagtgggtctcagccttaggggatgaaccctcagttttgggaattgcccacccctttcctggaaaactcacaaataatccaccccctgtttagcatataatcaagagataatcataaaaatatccaaccatcagctcttggggctgctatgcctatggagtagtcattctttattccttttaatttcttaatacatttgcttttacttaaaaagaagagttcagattagttcttctaaaactctatattcagggtagatttccatctgttttctttttctataaatgaaccaaaaatgttgaaaattctatcattttaagccattttctggcgccgtgtgtgctcttcaagcattgggttgtgcaatactgtttgcctttttccagcagtgtttctcatttgatttatcagagatgatacttggtaattcagtttgatattgtcccctgtatctgatgataaacacttgagggaaaccaggaaatctattttttatgttaaataataacactggccctttcattatcctttcagcattgcaaatcaccctttctgtctcggcaaagagagaggaattaagatttgttccgtgttgactcctacgtgattatgttattcagtgttaaatatgagagaactttgttacacagagccaggagggggcagtaaatttccttttttactgttattaaaaatggatcctgcgtttcatgcatagcaagatctcacccgtttgctctagaataccactaattcctaccccctaccccagcaagggaaatttttgaattcattgtgactctggttttatgtaacatttccattaggttttaagtagtgtgctttcaaattactacctgtaaagaggcaaaagcaaatttttgcatttgtaaaaaaataataaataaaaataaaacgctattttttctttttttttttttaactttgcaaaggagataaaatcacgacttgtcttaagatctgctttagctcttcccgttcccaagtaggtgaaggtggaactatcactagataaactgaaatcaaagtacagtgcctggacatgttcaggttcttgtgaacaatgagagaaggcaaggatgcctttaatgtacatagctgctttcctggtcatattctatcagttcagcaaacactatgatttcaaacaggtgtgcatgcccagagaactagcttgctgatcagcgtctggactggacccctgggcttgcctgtgcgttttctcttccttctgctgtggctgctgcttcctaaaacttgtgtctttgaatatcattaacttacgtaattgctatgttccctaccagggtacctaatatatctggctagttttaaggaacaccaagttctctctgtgggatgatttgggggtggcttgggaattattattggctgtgctataaatggctgaggagggaaataaaggacactttcaggacacaattaacactttctaatggcacagcctatgtgctacccagagactgggaggcagtgcagacccagagaaataatgacatacgatgagagcgcctcatgaccttcaggtatttggactgaacacacacacacacagacacagagagagacacacaaaacacacacagacacacataaatatatgtgtgtgtgtgtatatataaaacatgtatatatttgccttcaaaagtcgcaattccatagaaagaagaggtgagactcactatcctgcaattctgacaatccctcaacctgcagactggacatttctggtgacttctaaaaggtaataataggttaatgtaaaattaattgcgttttttgccatttctttcagtagaaaaaaaaacgcaattgcttttgcaccaacctaatagaaactatctaaagaatattttcttaagtatccaggttctcattagtcttcattttacaattgttcctggtttttttttctttttttccttcatattcccccgctgcttccacctacaccagatgaagcacagggcaaaaactggattatacgcaaattgtacactgatttattagcgtgagccaggagtttaatgaggggagagggaaccgtacaaacagctcttggggcctatgcttgagtggagttgtgccgccatactaggtttcagtatgaatttgggatagggtcttctaccccctccttccttaaggtagaaatgaggaatgtgtctacttacaaatgtccctggtacacctatcaaatgggctcacacgtgtgagtctctccatgaagtaccctgctgagttcagtagcatccgtccagtatttgttttgtcaggcatttgaggtctttaatgttttccaggacatttgactttgtttctctgttcctcctcgggcatgttagtggcattaacttacagtccagtatttacctgattccattttgaaatcatacagcctgttttggaaggctagttctactacgtacgcacagagatgaagggaagaaaattattttggtctctttaaattccctatctgtaaattgaagaaattgtagtatttccatcctcacaggtttgttttgagatctaagtaacataatgcagtcaggattttagcatagagctagccaccaagtgaacttcaataaatggttaatattttatcattagttttgacttttgttttcatatccattcattatgctttttggaaaattacttcaagcagtgtcacttcttacggtcattgtatcaccttaagtgaagcttctgcaggactgctatattgtggtatttatgcctttaagcagttttcagcttggggaaatacaaggttgcagtttacttatcaaatagtgaaaaacgtaacttgagcaaatttctctcctgtataaacagttaaatcccaatgtcttgtcgttgtttcttcttctagaagaggttattccttgagcccagttgtattttgtatgtttcataaccttggaaattgttcatctctatgaagtaatcccttttattacataatataaagggaagataaagtttttaattctcaacgcatctgaagtggtgacatgtagcaaacagctcattatcccccacaaaaagcacaattactcaatatagggaagcagtgctttcagaagctgcctcatattggagctgccccacgctggctaatgttggatattgattctgaataattcaaatagcaataaaattgggttttcatgacagtcaatcagaggcattttatatttaatgctcaatagaagaaacacggtgtctccttaccttctgaatttcaaagccattaaactaattgtaggtcattatgtgaaatttatctgcataattggaatagttgatctaattcatgtagcattcaaaacagtggccagagaagaactgatgaatttttagataatgatatatatatagtacatgtatacatatgcatacatacgcacacgtatatttgtatacatacacacacttttagtcaaagtagtgtcactttaccagcattcatttttgttaatacagtcaacaaatcatacggggataactttaaataattcatttgatcctgtttctcacatattcccagtggcctcagaagtgaatagcttctgttgaaatggagatactaaactaaggagttttgttctttatatgattttgctgatattttcttcttagttttcatctgtctttccaaaatagacttacctgggagatatatatgattatatgtatataattggggtcaccagaccccagggattctgatttaatttacttgagattgggacctgacgatcaagatttgtttagaagctcctcagttgattctactgtatagcatagagtgagaatcaaggtaaatctaattcagtcattcactcactcattaataaaatagtttatcaagtaccttttatcttctgcagtcttacaggcgttctgacggctaaaaggtgaggaagatagtattgtaggagccttcccagcaatccattaaaatgttttaaagtgccagtttagacatagaaacaaagaagatgtttatatacagctgcctggaaagcctaatacttctgtctctgggaatattatcaaaaccctagagggaaatgggcttctaaagggttcttggctgtgtgtagaaagtacctcattctcttctaactttagacttgcaacccttaatatatgacctcagattagtttgttggaaggtagagtgacatatgaaagcagaattccaccttacttgggagttgggtcttaaagtcacactctgtgttcacttaagttgagtttgtttctagcatgtgcaaagcagagatatttctcctggtaaatgctgaagtatcgtgggacaaatggagtttggaagaaagctgcttagaaacgagaatggcccaggagatacaacatgtaaaacttgtacaggatgcccgactccgagaagagataatggctgatcaaaaactcagatcctgatgccaacaaatgactatacttgttgaatatttttgtctaggaagtaatttggagagcttggaaataatcatggagataatcttgatgttctttatatattcccaggctgcctgttagaaagacatctctccaccttggcaattcctgcttcctttgacttaagtatttgcttccctaaaagaagccttaaataattataactctttacccataaggagaagaggaggggacataggaacaaagcctgagcaaatatatatggttcatatagggagatggtagaaccgtacaccagtgtacggccctaaggatgggggtagcaatggtgagaatcccttgaatctcattcttgcccaatttagaataagaaatacattatatagtaagcagtaagcatgtggaatctctctctctctgtctctatcatctgtgcatctgtcatctctctatctcatctatatctaatctatcaatttatcaaattatctaatctatccatctatctaattacctaactgtctaatctatctatccatctatctacctgtctacctaatctgtctatcaatctatgtatctatgcatctatgtatctgcctatctacagtcctgaaaaagggattggattcagagatgatagtgatatcattgtttaatgtgaagactggtcattttgtggaaaatcttcaatcatggtgaaataacacctcttagatgaaatgccactgtccaaacgatttttaaggtcactgctaggggcaaacagacaaaaccgattatttagtgggttaggaattctagagttggaagatggcttagatttcatttactaggagtttctcatatgtggctgaggagcagagccgcaaggggactgtactaaagattcccagaccccaccctgcttccttgaattagaattaccaaatatggggtggggagatttctatctttgacaggttccccagctagctccacaatgatcaagaaacagcagtgaggaaacactgcttttgttagtatcattgatgtcagagatcacaaaagagaggttatgtttgcaacccagatcagaagccagattataaattcctacctcaggaatatcctttacctttggaaaactggttatattcctcccttggaaagcctgaattagaagatgaatacagagggactgctgaggacagctagaattatctaagatgcaaaaatacagggaagatacatatcagatcctagaggaactaaatccagatactgaaggctaatgggaaatggtaagatgaggtgggaagtagagttctgcacaactaaaaaggacacaaaaatattgccagaagcacaggcagatactgaccatatatcattgtggatcgttgatgtctagggcacgactatactttagaaacaggggatcagtgacctcacatctcatcttttgtagcatactgctactctctgtccttcatcctgtgggtttgccatctttttgtgctcttgcagaattctagctgcgagtatctgtgtctcagttcttgagagtatttctcaggattatgggaagttgctttgcccatgcacaataggagaccagaattgtgaggcaattaatactccagggaatagcccttaactaatggctcttgggagctggagtgtaaacaccccagctccctcactccatgggtaggataatgctgaggcacacgttttgaaagttttcccacatgactaggctcattgtatatctggcttcttagtccatcctttattacaggatgcttttttcttccctgtgctaatttctccatttctcccttccccactgctgtttcctaccttccaaaatgaacaacgttttctaaaatccttggctcattgtctgcctctaggggaatccaaacaaacaaagtatctgggtcttcctatgttttcttgcacagccagttaaaatctgacatctaggagtaatgtatgaaattagctgagcctactaaaaccaaatttgaatcaaaagggaagattttttttaaaggatctaggtaaattctgggaactgtattggaatgacttaagctatggcttgagatctatccctcttttaacctttccttcatttctctttcagtcttccctttgcatctgattcttctgcatagtttctggtctctttcccctatacatctgatccctccatctttccaaagattgactttccctgcttactcacagttgctgcttctctgcagcctcagctggcatgtaactggattacagtggtgttagatgtggccaagaatccacagtgaaattccagctccagaattcaccgtctcggccccaggctcctgttcagattctcacgagagagtgagtctctgacagatgcagcattccttgctgggaatcagcttccccaaggcaggtgacctctctggcccaagcacctgcactgcacctgcactggggagtttattgaggatggtgaggtcacctgattcattgagtatctcttccagggggatgggcttaggatcgtaatctagaaaacatttagtgtagcaggcaattgcttttcatcctgaataggcagactttccaccacgattaatgcacgtagtaggtctgcaaggcagggaccctctgtgttaatgtaaggacagtgacattggagagaagagcaaggtgaatgcttagcatttacatagtatgttgacgtcctctgttgcctaaagcacataagcctgatttatgccatgggagaactagcacattctgccagtgcctctgtacatgctgcacacctacatttttgaagagtaaataatgaggtggagtttttttgttcatgtttttgttttaccttggacagccattatgtaaacttttcacaacaaatttgcatctgaaagtttgttgatccttgtgttatatttcatgacaaatgatgaaaatgctaatttctgaataaagtaagagctacttttacacatttatttgcagaaggaattataatttctttattggcattttttaaaggttaggtacatagtctttttaaaaattaacttattaagagacgtcaacatctagggctccctcttacataaaaagatgctgaaaacagaaatatatgaatataagcactgttgaatgcaaatatcaaaatgtgaataatgagaacagccaacccctcatctcccataggtcattagaaagtgcttcttcactatttatttattagcaggtgccagagccctggcaaactcccttttttgaaatttggccttcagtgtgatagaaacaaatatgacttgggatgatagaaacagaaatatgacttgggcatatatgtagtccttccatccttccataatccagatatgctgaactgatctgtacacccatgtgtcagagcaaagcctgtgcctgtcagctgaacccactcagtcctacagccttcctgaaaattaaattaaaaaaggttttttggtggcttttataagggcaatagcagaatttgctaggtcaagctagtcaacatttttataatgaaccatttaataattaatatgtagcaaatataaataatggttgtagcctgcagtagttaaaaacctgagatccttacaggaagtagccaggggtggtggtgtgcacctgtagtcccagctactcaggaggctgagatgggcaggtcgcatgagcccagaaggttgaggctgcagtgaactgagatcacaccactgcactccagcccgggcgaaagagcgagaccctgccttaaaaaaaaattctgacctctgaaatctgacaaagctgggttctactaccatctctgtgacttgctgctggaaagcaggagctcactccagagctgacgttcacccagaacgcagggccagtgttggttctgattgtcagcgctatgctgtacagggtttcagttcttagatagtctgaatagcatcgttgtctatctttaagggttgccataaagacaaagtttataggacacagtgttcagtccctgccacatcattacagtttaacacgtgcttatgtttcttgccatggtcattttagagaacttataccccactgcctgggtatgaaattccagtcttattaccagaattgcacagggatccgccagaattatacagggttcaacaggtttatttgacgttttttgtgcttttgatttcagcccacatccgtgcagctctgcaattgtatgatgtctgacccctctgtccaactcccattgaatatctatgaatgccctttgttaagcagtgtgcatgcgagggctggtatagagatatttgctttgttcagaaggcaaaaagactatcctctgggctcagttttgaattcacaagattgctaatcattgatcgtaacagctctaatttactgaacactgacaattatgtagccatttcctttacgtggattatctcatttaatcctcatgataaaggtcatggtattgcctcattacagatgaggacatgggtccaggaagttaaaccacttacttgaattctcccaaagtacaaatggcccaactaggagttcagtccatgtaattaagactgtgctcttaactactctcctaaactcagtgggactaggtctctattcctcagacattcttttctttgtgatagtttctcctctcattctacacatattttatcttatttgtgagggaagagtcagaaagcagcactagacttcagttcctctctcctttcttttcctccttttacccctatccaatcaggacaatataagttgtacttaagatttgtggaaaatattttttacgaaatctagatgcataaagcaaaacaggtgcagcaatgaaaagatgagtcattttcaatagttcttgacgcctagtaaaggttatcagaatgtattaggttgtgttgcctcgcttgagcccaggagtttaagactggcatgggcaacacagtgagactgtgtttctataatttttttttaaagtagcctgttgtggtagcacagtgtatgtctgtgttctcagctacttggaagactgaggtggagggatcacttgagccagggaagtcaaggcttcagcgagccatgattaaacaactgtatacactccagcctgggcagcagagtgagaccctgtctcaacaaaaacaacaacaacatcaacaacaacaacatcaacaacgaaaaccaaactggtggcttattgctagatgcacatgatttaatagaaagggtatggtttgggagttaagtacacttgcctcctacccaactcagccactcaccagtgggttcatgttggtggaattacttaaactctaaacctggttacttagtgccgtcagctagggagcttgtacctactattcagggctttacttttaaggattggaaaattgtaaataggtaaatggatagatatttttctgtcttagtctctgcagtgcctgtcggagactaaatcttcagagtatacatatttcaacagttatttatttggagacgtttgagtggcagctactgttgtgtcttttaactatttctcgtccccatggatgtgacttgtatttgcttatgtcccattgcatggctaaaataacttgaaacagaagttgtgtaacattggatcgatcacaaaatgtttgggtaacaatgctgagactctctcagatccctagggttgcatttcccctagaaactgaatttggttatgaaaagccccagtgcaggagtctaccatgatagttcccaagtggcatgggtggtgatctgtggttcctctccccctgtgaagaacacagacatgaggaaatgaatccttgaggcggagcattggttacataattcacaggccctccttctgagacctctggaaataagcagatggttgaagaatgagggagtttttgtcgccattttttttttgccttttgctttaatttttggaataaataaggtttgcttccctactgggcctgctcaagggtaattaacttcttctttttgaaagggatttagaattttcagcatggttaccccaatatttttctgatctatccagtattacacaatttttgttcaaattattttagccatccaaggagacataaatacaatttatgtccatgttgttaccatggaaaaccagtttattttattttattaattttttaaattttatttttccataagttattggggtacagttggtatttgcatacacgagtaagttctttagtggtgatttgtgagattttggtgcacccatcactgcatcatattgtcttttatccctcacccctctactcttccccccaagtccccaaagtccattgtatcattcttatgcctttgcattctcatagcttagctcccacatatcagtgagaaaatatcatgtttggttttccattcctgagttacatcacttagagtaatagtctctaatctcatccatgtcattgcaaatgctgttaattcattcgtttttatggctaagtagtattgcatcatatatatacatacctcaatttctttattcactcattgagtaatgggcatttggattggttccacgattttgcagttgtgaattgtgccactataaacatgcatgtgcaagtatctttttcaaataatgacatcttttcatctgggtagatacccagtagtgggattgctggatcaaatggtagttctacttttagttccttaatgaatctccacactgggaaaaccagtttagaaggacaggttgtgatttgtagcaggtggtggttctgaccatgtatggaatgctgtattcatacatctgaattccagatgtggataccctggaaagtgggatacctagagtctgaagcaattgatttggagcctaggtatagacttagcagggaggagtgctgtgatggattggtgatgtctgctgtgaagttagcatcgggaagcgacagcctgtgtgccctgtattcgccacttatccctgacacgggaaccgtctgaaaagaggagcctcatttaagcagtattcagtgaacatctaccatgtgtcagatacttcagtgggcagtgaaaaatcagttctgagtaagatagtccctgccttcattgggtttacaatagaggaaacaacagaggcaaagctgtaaagaatattggcaagaatggtagatatttggctataggtcaagcaaaaaataactcaatgtaatttaaataaagggttatgatatttttgcatttccccgtatttcttctgacaaaagttcacttgtgattatccctacccttatatgttatttatagatttcttgtttagaagtataaaaatgcatcagttttatctgttgtttaattatcaggtaaagactagaagaaatattgggccttcatgtaagtgtgcatcacagtattaaaatagaattcaaatatttgaaagttaaaaagaacagacatgttactccttgtccagttcagatggccaaaacagctactacgtggtggctatgaactttctggaagtcattgctgctcaacatcagttttaaatctggactctgcttctaggatgtgttttctcgcccgaggctcatttgatgtgagggcttagcaaataaatacagttgggaagagtgaagagtgttaatcaggttcaatataggctaggctttttcctcaaaatgtcccagagccttaggttggatgaatgtctaggtacacaaatgatatatgggatttaaataatagtccatttattaataagaggaaaggtatcttatatcaagattgtttatatttcatttagttaactccttttatttgggacattgcagacttttcctaaacaaaatgtactataatattttcgagatgggggaagccatgaagcctaagttacatttaaaaatttgttaaataagataatgagtaaacattcccagcacaatgcttgagccagagaaaagtgctaaataaattctaactattgccactgggaataataatgtgtgtctgcaacagaaaacaaaaacacaaaggacttgtctcttttttttttgcggtaattcttaaaaaaaaaaaaaagtcaggcattttcctcttgtcaagatggtgtaatagggaccagatgtaacctctcatcttaaatgactgtatgatgatcaaaacacatggaacaatggtttgcataacactgtacatcaaatagtaatggacagcaatccttgacaggagcaaaggatgtgagtcctttgattgccccagcttactgctttaagagtttccataaggagaggaggggaactgagatgaagcctggagtactccctgtattgaggaagtggaactgagggtccggggagcaaggcacctgtcattctgagtatagagcatcagagtggagagtaggagcccaggagagtatttataggaattctgaatgtgtatgtatcgaataaaagagctgtaaaatctgtgaagcaaaaacatgtagaacataaaaaaacagatatatgaacccacagttataattgtaaacctcaacatccatctcgcaacaatttatagaatgactgtataggacataaggaaggatagagaagaactcaccaccatcaaccaacaagatgtcattgacaattacagaaccctttaccccaaaagagcagaatacacattcttttaaggagcccatagagcatataccttgagagaccatgtcctaggccataaaatagacatcagcaaatgtaaagacagtgaaatcttggggtgtggtctctgacaacagtagaatcaaactagaaattaattcataaagagaacaggaaaaaatcccaaacacttggaagctaaacagtaaacttctcagtaatccatgagttgaaaatgaagtctcataatacattttaaaaatgacattgaacttaatgaaaataaacatacagtgtatcaaaatgtgtgtgtcgcagccaaagcagtcattagagggaaatgtatacccctaaatgctttcaatttaaaaatgacaattctaaaatcaataatgtaagctcctacttcagacaaaaatagggaaagaagagctaaataaacctaaagcaagcagcagagaggaaataataaaaattggagcaaaagtcaatgaaattgaaaacagaaaaacaagagagaaatgctagttctttaaaaatatagaagaaaatggcaaacttctagtagggatgatagaaaaaaaaaaagaagggaataattacccatatcaggagagaaggtgagaatattactatagaccctgcagacattaaaaggataataagagagtactctgaacagctctgcacttactcatttgagagcttaaaccaattctcttgaaaagcacaaactgcaattcacccaatatgcaatagataatttgaatgaccctataactattaaggaaattgaattcataatttaacatcccccctccccccaccccaagggaatctccggtctaaatggtttcactggagaattctacccatatttttaaaacatttaacaccaattcttcaaaatatcttctagaaaatagaaggtgggccaggtggggtggctcatgcctgtaatcccagcactttgggaggccgaggtgggtggatcacatgaggtcacgagttcgagaccagcttggccaacatggtgaaaccccatctctactaaaaatacaaaaattagctgggcgtggtggcaggtgcctgtagtctcggctcctcgggaggctgaggcaggagaattgcttgaacctgggaggcagaggttgcagtgagccaagattgcaccacttcactccagcctgggtgacagagcaagactctgtcttaagaataaaacgtggtggtccacattccactttattttatgaagccattacactctggtcacaaaactggacaaagaaagtaacaaaagaaacaagaaaactgcaaatcaatatccctgataaatatagaattaacactatttaaaacattttcaaatagaatctaacaatatataaaaagacttatgcaccccaacctaatgaggaatagtccagtaatacaatactaattcagtatttgaaaatcaattgatgttattcactataccgataggttcaagaagaaaaatcacatgctcacattagctgatgcaggaaaacatttgacaaaattgatacacaaccagaagtctcagaaaaaaataagaatcgataacagttttcttaactcgataaaggatatgtgcaaaaaacctacatctaatattgtgtataatggtacaaatgaatgatttccccttaaatacaggaacaagacaccactgctattcaacatagtagggaatttctaaacagtgcaataagacaagaaatataaataaaaggcatacagattaaaataaagaaataaaactatccttattagtggattccatggttatagagtaaacaccaaaaatttaaaacccacacacattttgtggactgacaagttagctcaccaaagtcacaggatatgaaatcacattgccaaaaacagtttctaaatttcttacagtaaacagataaaagcaacttaaaatacaatacaattttaatcacccagaaaaaagggaaatatttaggtgtgcatctaacaggacttgtatgctgaaaattatcaaatgctgatgaaaaaggccaacatgtaaatagatggaaaagcacagtgtgttcatggattgaaagactccactttgtaaagatgccatttctgctcaaattgatacacagaggtaatgcaatcatttcaaaatatcagcagagtttttaaaaataaatatagacaagattatctcaaaatttgaatagaaaagcaaagaaactagagttgttaacacaattttgaaaaataagaatcaggtgggacaaaccagtctacctagtttcaagacgttatgtaactccagtcatcatcgctatgtggtatttgcttagatgtagacacctaaatcaatggaagggaagagaagacactgaaatagccccagacaacattgaccagctgatttttgccagtaatgcaaaagcaatttaatgggggaagtataatctttacaacaatggtgctggaacaattggctatttataggcaaaataataataataaataataaatcttgacctaaacttcacatctcataaaaattagctcaaaatggatcgtaggttaaattgaaaacataaaactataaaactttcaggcaatcctataggaaaaatatctttcgaacttagagctcggtgacatgccaccaagggtctataaaagaaaaaaatgataaattagacttcatcaaaatttggctggacggggtggctcatgcctgtaataccagcactttgggaggctgatagcaggtggataacctgaggtcaggagttcgagaccagcctggctaacatggcgaaaccctgtctgtattaaaagtacaaattttagccaggctaactttggtggtgcgcacctgtaatcccagctacttgggaggctgaggtaggagaatcgcttgaactgcggaggtggaggttgcggtgagccgagatcatgccactgcactccagcctgggcgacagagccagactcagtctcaaaaaaaaaaaaaaaattaaggatgtggtctctgaacaatcctgttaagatattggaaagaaaagctataatgtggaagaaaatacttgcaaatttcatatctaataaagaattaatatctataaatttatgaagaagtgaaatggtggttaccagaaactggaagggtaaagggttagagaaatgtttgtcaaagcatacaaagttttagttagataggaggaataagctcaatagatcaattgtacaacatagtgatagactgtagttaataattctgtattatattcttgaaaatcattaacagagtagatttcaaatgttttcaccacaaaaattataagtgtgtgtggttctgcatatgttcattaacttgagttagccattctacagtgtatacatttttcaaaacatcatgttgtacgtgataaatatatacagttattattgtcaattttaaaatgtcaaagagtgaaaaccaatccatttagaaaatctttttaaagtgacttgaagaaatattttaccaaagaggatatatggaggcaatcaagaacatggaaagaattcggcattactagctattagggaaatgcagattaagaatataataacatatcattatacacatgttaaacaggtaaaatttaagatagaaactatcaaatatttacaaggacgcatagaaagtgtgtctctcatatactgatgatggcaatgcaaaatgacacaactcttctggcaaattgtttgtagtttcttaaaataaatagacatttaccaatgagtcaacaatcacatttctggacatttattccacagaaatgaaagttaatgtccacgaaaaaccccagaaagctatacacaattattgtcagcagttttatttctgagtcaaaaactggaaacaaccaaaatatctacagtaggtgaatggttaaagaaactgtgagatacccgtactgtgaactactattcagcaataaaaactgaatgaactatcgatatacacaacacctgtgatgaatctcaagggcacaatgttgaatgaaaattaaaacagtctcaaaaggttatagactatacaatgtcatttatataacactttgaccatgagagaagtataaagatttggacatagttgccagtatggtgggagaaaaaaagatgggtagaactataaaggtacagcatgaaggagaaatctgtggtgaattagttctgtattgtattgtggtggtagttacagaaatctatacgtgtaataaaaggggttaaacttatacaaacacactttatcaatgtcaatatcatatagtacaatatgatattatagttgcataagatgtaacaaatgggttaccaatgtcactagcaggatagggaaacaatacttctctgtagtgtctttacaactgtctgtgtatttgtaatattttcaaaataagttataaagatttgccttttatagtgttactgtaaacccttaagttcccactaaaaagatgaaatgtagagttatagctaataagccagcaaaggaaatagaataataaaaattttcaattattgtgaaacaagacacaaaaaagaggaaaagggaaagttgggacaaatgaaaaaccaataggttataggtttaaacctaattctgtcaatcacattaaatattaatgttctaaatatactcagttcaaaggcagagattgtcagacttaataaaaataagatcaaattataggctgtgttataagaagcacattttaaatataaagacacaaatatgttgataaggatgaatggtagtgcacacctgtagtcccagcactttgggaggccaaggcaggaggatgccttgagcccaggagtttgagaccaacctgagcaacatgacaagaccccaactgtacaaaaaatttaaaaattgaagtgagcatggtggtgcatgtctgtagtcccagctacgtgggaggctgaggtgtcagtatcacttgagcctgggaggctgaggctgcactgggctgtcatcacaccactgtattccagcctgcactccactgcactcagggcaaagcaacaccctgtctcaaaaggaaagaaggaagaaaaataaataaataaataaatgttcattattttttctcatgtgttttgactatttaaaaaatcatgttcatttatttctgattatttgtaacacattttcctatacattaattaaggatattaaccattcatctatgatatatacagtaaatgattttccagtttttcatttgtggtttaattttgtcaatgttatcttttcaatatataaagcaagtggtgtgttcgcatgtttaaataaagtgtatttctttcctttaaaaagtaataaagatacagaatgtgatcactaatctaaagaatactgaagtaactatactgatatcacacaaatagattctagagaaaaatacatcagggataaagaaggtaatttcacaatggaaaaggtgacttaatcaagaagacattaaatatttatgcacctcaactttaaaatacatgaaacaaaactgttggaactggaaggagaaatagccaaatatttcagtgctagtctctcaataactgacagaataaatagctagaaaattattaaatatatagatttgaatagtagtattaattaatttgccttaattaatgactgtagaaccctctatcctaaaatagcaggatacatattgttttcaagtacataaggaaatgttttcaagaaaagagctattctgggctgaactattttttttaatcaataaatttaagagaattgaagttatttctccaatcgcagtggaatcaaactagaaataaatgacagaaatataaaatgaaaatctccaaacacttggagaataagccacactttaataaataacctgtggatcgaagagaaaatctaaatggaagtcaaaataaacagtgacctgaacaaaaatatacataagacatatcagattttgcgtagtgttattaaacaatgcttgaagagaaattcatagcattaaatacccatattaggatagtgaaaaatggtcttaaatcacttactttatcttctgccttagaaaaatagaaaaagaaggtgaactaaattaagtagaagataggaaataaagatcagggttgaaatcaataaaacaggtagtaggccaaaaatggaggaaatctttgaaaccaaaagctggtgttttgagaaaattagtaaaatcaatacacttttagccaggcttagtaaagttaaggagaagatacaaattaccaatatcagtatagaaagaggaggcatcactacagactctataggtattaaaagaaaaataagatcatattatgaacaaccttattttatgatattaagatttaagggtgaaatgggtaaattccttgaaagagatctaagaaagctcactaaagaagaaatagatcatctgaatttcctgatatatatcaaataaattaaatctggagttgaaaatcttccctctaagaaaattccaagcccagatgactttgttaataaactttacaaaacatttctttcagaaaatggaaaaggaagttacatttcccaatccattctatgaggcaacgattactgtaataccaaaaccaggaaaaaattcacaagaaaaaacccccgaaaccacagactagtcttcctcatgaatacctatgtgaaaattctaaaacaacaagcaaatgaaatctattgacacatgaaaaggatactatatcaagaatgagcagattttgttttaggattgaaaagatgccttaacatttgaaaatcaatttatgaaatacaccatattaacaacaaaatgtgaactaacacaattattttaatagatgcagaaaaggcatttgacaaaatccaaaatggattctagttttttaaaaagctcagcaagaatagaagataaattggtcaatatgataaaaggcatctatggaaaatgtatagctaatatcatgcttaatgaggaaatactggtgttgcccccaagattgggaacaaagcaaggatttatgctttcaccacttccctttcgcagtattttagccagtgataatgagcaagaaaaggaggtaaaaggcatctgtttagagaagaaaaaaactgtctttattcataggcagcgtgatcatctgtgcataaaattttatgctctctaaaacagaaagtcactggaacttagaaatgaatttatcaagttgcaggatgcagtatcaatatatgtaattcaattatatttttatatattacacaaattggaaattaaagcttaaaaatatcatttgcaatagcattttgaacagtgaaatacttagaggaacaaatctgatggaagatatgccagtcctatacccttaaaactacagaatagctgagaggagttgaaagagacttaaatatgtgagcatacaggccaatatcgtgtgtaggttgagagacttatcttagtctcccctaattgatctgtagattcaacacaatgccaatcaaaccccagcaggcctttttttcaataaaaactcccaaacatattctaaaattcatatagaagtggaagtcaacttgaatggccaaaatatctttgaaaaaaacaatttgggaagatgaatactgtatgatttgcagacttaatggaaagctacaataatcaagaaagtggtgcgctgggcatggtggctcacacctgtaatctcagcactatgggaagactagacagttggatcacttgagcccaggtgttcaagaccagtctatgcaacatggcaaagcctcatctcaacaaaaaatacaaaaaattgccgggcatgatggcacatgtctgcagtccctagctacctgggaggctgaactggggggatcacctgaacctgggaagttgaggctgcagtgacctgtgattgtgccactgcacttcagcctgagtgacgagtgagacacaggtgtcagggaaaaaaaaaaagtgttgtcttattaatccttaactattattaattaattgaaagtttacatagggcagaaaagtgaaatattgatacatataatcaatacttatatatttataagccaaagtttgctagtgatcccaagtctgttataggaatgtgagattttattaagcataacaactcaaatgttgatgtccagttcatagaaactccatctcctagcagtcttctcagtattttgggagacttcagcaggtgtctcacttgggctcaaactaaaatctcatctctcctgtggagctatactactgtgcagatatcccctcaccacagattattgaggtgttagcctacagaagtcctagcagacctctgcagaacccctcacggtaccatagcaggtccctataccatgccaaatgggagatccttaaattatcttactggtcggccaggcgcagtggctcacgcctataatcccaacactttgggagactgagacggtcagatcacaaggtcaggagttcgagaccagcctgactcacatggtgaaaaccccgtctctactaaaaatatacaaattagcctggcatggtggtgtgtttgaaatcccagctactcaagaggctgaggcaggacaattgcttgaacctaggaggtagagattgtagtgagccaagatggccccattgccctccagactgggcgacagagtgagactcagtctcaaaaagaaaaaaaaaatctatcagtcagtcagtcagttagtctgtctgtctgtctgtctgtctgtctgtttatctatctgtctatctgtcttactggtttacttgttgtcacctgggatatgtaagaagcctgttggggcagtattcacataatctctgttaaaagtgatatttttagtatcttctatgggtcttctctttaaacatctcagatattgtctcttgtataaaaagtaaaagttgctatcccacaccacccctactatgtccttctgattgctgccttttttgcaaaagcagaaatatgtcttctgggcaccatccgcttcatggacagcaacttgtgcaaagagattcctgggagttgtcaatctacatgctcatagatgtctgaattgtgacatatcctcagtccctacccgccatccagagtcatttttctgacataaaactttcataggcaatccataccttatggcttcaccattgtaaaactggtggaaagcacaacacgctatcaacttcagcatcatgaggattggcctttgttttctaaatcctttctcttttgaaatgcacctattatacaagacttaggttgtatgatttgaaggattgttcaccagtagtgacaccgttatttattgaaccattttcctgatactttttttgtgttaactgaacttgtatatgtaattattatctggtaggatcattttttttcctagcgttatttatggcatgatttactagcatctcgttaggcaataaatgcatatttaattggatatccttatgggttcagtaccatgctgtgcataaattccagaagtatacagacccagccttcttttctctttctctctctctctctctacacacacacacgcaaatacatacacacacatatatacgtacacatacacatataactatatacatatgtatgtatgtatgagcacaaattatttggggtgggcactgtggctcacacctataatcccaacactttggaaggccgaggcaggaggattgcataagcccaggagttcaagaccagcctgggcaacataacaagatcccgtctctccaaaaaataaagataaaaaattagctggccatgatggcatgcatttgtagtcccagcttgggaggctgaagtggatctcttgagcccagaagttcgaggctgttgtgagttataattacaccactgcactccagcctgagcaacaaggcaagatcctgtctcaaacaaaacacctaattatttggagtatatagaatttgaacttgttatgcatgtatgaacagaagttatttggagtatatagattttgaagttggcttagatgtatgatgaattctcagaggttatgattaattatctttacctttcattctataagattttattgaataccttctagatgctagaatttcagcaatgagcaagactgataaggtctttgtctaaggaagaacatagaccccataaaattagtgttacagttctttcagaatttgtctagcaacctttctggtttttgctagaaagttctctcctaattgataaaataaaaatatttttgaaagggaagaattaaaaatcatgggattaaatgacaggaggagccaatctgggtattcataaaatgactgatatttctgtccacagttgagtgaaaagtattggaaaccaacattcactgagcaactactaggaaggccggatggcattcgagagaaaaagttatggtctcaggcagatctgagtttggatcctgctctgctgtgcattccaggcaagatcgtgttttggcaagttgtctgtcccatctgagcctgggttcctcattggtacagaaagtcagtaatgacatcaacccaattaaatgagagaacagatgcacacaggacgcattccacacagcgcctggttcaaagtaagtgctcaggacatgagtgccaccatccttcccccaaggaggcatgagatggaccctggttcttgctgttacggtcactcaggcaatttatactcataaccgtccggggaggtaggactcatgttttccccactttccagataaggatactgaggttctggggatttgaactaacctgcctttgacttcatatccagcaggcagccatgccgatttcaaagctccttctcttttcattcattgcaccgtttattgacctcatatacattcttcatctcctggagtgtctctcctaatcagtacatcaggggtaacaaatcttagtgacctcagtaaataataagcccaaagaattgcagtgcacagattcttgcttaagaataacagcgacttggaaagtttttcagtgttaacagagcagccttatgattaaaatcactgaagaatgcgatgtaaaatgtttttatttcgttttgctttctgtttcccttgaaataatagtcagcaggaaacacatttctgaaagacttctccatttctacatcctcagaatacaataagggccaagctgactgtgtcagggtgttcagagttagtaggcacacaaatgaaaagatggtgctctcagagttttatgaatttttctgtctagcagtcttgggttggaaagtcatctttgaaattgatgtagctatcaactaggggctaacattaagatttcagtcgaggtgtatagggttatgatctttctgttactgtcagaactgcagctgttgtatttgcattgagtggcatgctggagagagcaaaatgggatgcaggagaaggaaaaagaaatagcaaaacctattgaattgtgggctctacctgagggcatttgttaaaggtaaattcatcaatagctgttaagtcatttgtattgaatcattctcatagcctcacagcagttcttagttttaataatgggtcatagagaggagcttggtgatagatgccttattatggtatttaggcacttaattgcaactgggcttaaaatagcagcagaagctgaaaccagggtggctcaggagtaaattatgttttcagtctaccaaaacaccctttttaaaattcaagtttaatatttcttgacatatgtttcttgatacgctgttaacagcagtttatcagagatagaagaatgttaaaataaactggtgaccgaactatggtatctaaaggcatgccttgttcatcaccatcagagatattttgaaagaaacattgagacccaagtttaaaacacctgcaattatgctgggacaggggtgttcattgattcattcattcatgcattcattcattattcgtcatttattgctaatgttaaagggatagggcagtgtatgagacagacccttgcctttgtggactaattattcagtggtggaagtgagaaaaacataaatagttaataacaataaacgccaaagggggatgtgtgtgatgatgaaaccaggaagctgaaatagtgagtgatggtagaagatacagtagtgttttcttcagattagtgggctagggaagtgctcttggagaagaacccatttaagcagaggtctgagtgatatgaaggtgccaactggccaaaaagaggaaggatcattagaaacagaaacagcatgttcaagggccctgatgtgggaaagaactaaaaggagatcagggtggcaaagcttagcagagaagtcagtggaggggtaggacataggtttgaatagcagataaaggccaggtcctgtgtggccttttcatttactttacattttattcgaaatacaatgggaaacaatgaagagttttaaggacaagggtattgagctctgatgtatattattaggagattgtttttattgactctagaatggatggggagtaggtggctaaggaggaagttggcagtggtacgggagagaaatgacagtgccctctaccagaaaaatgaatggactgaaaatgtacttagaatgcatgctagtagataaagaggaactagctaggaagttccctaaaggagggtggtctgtattcttggggcatttgtaccctgatgactgaacatcctgacttcctatgtcttagtccatgtacagcaactctttgcctcacttgtaggtgaaatgattttggagtcactagttggataaagaactagaaaggtagaacatacagtgcttcctctgcacatctgatttgggagttttgaagtttacttgtcttagactgcatgaaatgtcaaaggaagccagtaacattgatttatttcttgagtccgttggttatcatcagcttgctgcttacagtatacaagcagatagagccagaagcggcatttccaggaattgaacctgcgttgtttactgcccctgtggtcttatgaagaatgtgtgattatcgtaacccacttgctattattttcataacaaagctgtctctgaccagctacaatcttggacttacataattgaattttagatggagatgcgctgctggtttatatgaattttccaggggtgccagcgtgagtccaggctttaacaaacaatatttttaattgagattttatgtccttgccctcaaatcaagcactttaataggatcccagttggaataggtgactcagtaacaagttaccactgctttcaacttcagaaaggtgttaatttctctaactcctgctgggcgtccatctactccggtgacccactgcctgcatgtaccataaaaacgagtgttttgcattccattagtttcaaagtacagccttagtagtctgcatatttcttgtagcatgtgctggctttgttccatcaggcaacattaagatagaaaagtattaaaaatattgatttgtcatttataacatcgaagtgatagattgaaatgcaatttggatgtactccagacctccaataactttgacattatcagacgaaatacaatgatctcagtctaattaatatgctgtgtccatatgagtaaagtagagagaatgaagcaagaaattggccacaaggaagtgatagctccatgtttcaagtagttgtagaatttagagatggaatatgacatgctctgtcgctggaccttgctatgtgctggaagctgtgttctttccatgtttgttcatctttgaaagcaagttagcgcattcctaaagaatagagtgatactcttcactgaactttgtaaacttctttaagctttttattatggcatcttgccataatgttcttccattcccctgctctggaataccggtaataactctaacacacacacctttctgcgtatcggtttcatgcaacaggtgcacctatcttgatttcaaaactttcctatccccctttcccttactgcttcttcacttccatcctttcctgctggtaatgaaattgtcaaactttattcctactcctatttttttttttttagcagggttctgtgttctctgtcagcctctctgctcacatattgcagttcctctgttctcccagagaatttttatcttcctgttggcaatatgtttatacggtgtgaatatgtaataattgtacttggttgctatggagaagggaaaaatacaaatgtgcaaatttcaaatacacaattgtgcaaatttcaaaatttattgtaactttttcatagtggtcatatagtattattaggaagtaatggcataaaaaaatacaaatattgaacttgagtaaacatcatgtatactgaaacttgtagggggtattttaatgatgtgtgaaatttactttgaaatgcaccaaaaataagatgggttgatggttgcagagagggatggacagatggaaatagctgggataaagcaagtatagtaaaatgccagtagtagaatataggtggtagatatatggatgtttgctgtaaaattctttcagctttgctgttttgagatttgcatactgcagtattggaaaaatatggtacaaaagtgaatagtcatatagtcaacacatagactgagataaaaattgtgtgcctgcattaatatctattcttttatttagggatgctttcaggaccgtagttgcaggaagatcatcttgctataacccagtgtccccctttcatctcctataccatgtctctctgcctgttttcttcttctctttgaatatttgttacatctgtcttaatagagactgtgcaatttcatctcttcatcaactcctgtaagtagaaccagcaacagagcgaaagggagaaaaagaaacgtacttctcgcctgccttccttttctgtctccccgtgagaagcctcgtgccctcctcctgtcttgtgtcttgtgtcagagttagcggagcagcagctctggcctccttggatttatgtgattcgtagtgagagaatgctgccacagctgaggctgttgcctgctctacattgattgagtttcctgggcttgagggatttttgccgagctgagttttatggttgatgtgctctcggtcatttgtcataaaatcattcccaccaagctgtttactgggtttgaatgcttaattactgaaggagaagagaatcactccttatggagctgactgttgacttggatgctttttactgggttgtcttctggtacccaactcttgctgagtagtttatccaatatacatacccactcttcagcataaaaaaataaagacacccataattttacctaagtattttgagcagtgcaaagacatatcatttcacttcatattatgacagcatttttcttttgagtacaaattgattgcaaaactcaacactcaggcagctacagctaggaaagtgtctatgctctggggttcaaatgacaatgttcacctgctttattcagatcaatttccagaaatgcattgctgactctccgccaactcaatatcctcaatccaaattgcataaatggtgttggatataattatctctctgaaaaatttcacctaaattggaattaaatttatttgtaaaagcaaagtcatcttgggaattatatttcaaaacctacggtcgaagattcagtgaatgaagctctttccttttgtttcttccacaatttcagctcctctttttcatgaggaaaattgaagcactcttcgggttcccactgctccctcctctgcactaattcccacatagaatttctctctacaaattggcctccactaattttttgcattggttgtgtcttgttgaatttttcaggagcacacttttatatacggggatgttgttttagaggtgggagaaagagagaattagagagagatgcaggaaatggaatgttgttttttttttattattatagtttaagttttagggtacatgtgcacaatgtgcaggttagttacatatgtatacatgtgccatgctggtgtgctccacccattaactcgtcatttagcattaggtatatctcctaaagctatccctcccctctccccccaccccacaacagtccccagagtgtgatgttccccttgctgtgtccatgtgttctcattgttcagttcccacctatgactgagaatatgcggtgtttggttttttgttcttgggatagtttactgagaatgatgatttccaatttcatccatgtccctacaaagggcatgaactcatcattttttatggctgcatagtattccatggtgtatatgttgcacattttcttaatccagtctatcattgttggacatttgggttggttccaagtctttgctattggggatagtgccgcaataaacatacgtgtgcatgtgtctttatagcagcatgatttatagtcctttgggtgtatacccagtaatgggatggctgggtcaaatggtatttctagttagatccctgagtaatcgccacaccgacttccacaatggttgaactagtttacagtcccaccaacagtgtaaaagtgttcctatttctccacatcctctccagcacctgttgtttcctgactttttaatgattgccattctaactggtgtgagatggtatctcattgtggttttgatttgcatttctctgatggccagtgatggtgagcattttttcatgtgttttttggctgcataaatgtctcctgttttaatgccaagataacccgtcagaacacctgaaatatttgctacagttttgatgtttcatttatctcttagtggagcattgtgttgtttcagtgttttatcatgaagaactgtggctcttttaactgtaaggaatgagaactttagtaaaaacaacttttaatcactttgctataaatataatactagagaattcgtttcttggagtatgatttccctgttattcaaaaacaactacttgtcacccccttgtactttggccttcttttttcttctccccttcttttaactgttgcccctatttggagcgattatacttaaagtaatatggattctttcagagctgccaaaaggtgaaattgactttttgagaatgtattgctgaaaactgcagcagatgcactttttccatgtagaaacatcctgtgtgttaagaccgaaagggaccatttacagccagtttcaaattgctagctgaggtcaataagtgcccacttctgcaatcacatcagccccgtttggatgacagtacacaatgaggtgcctcccagggagtgaccacattggcagcaaaaccctttttgcaagttttatttggtcattcatagtagaaacctttaaaaatcttcaacatttaatttcaagcatttaaaaaatatatactgtagtaccatttacctataactggatttatttaaaaattatatggattggggaaaggacaccctcttcaataagtagtgctgggaaaaaaatggatatccgtatgtagaagagtgaaacaagaccctatttcttaccgtatacaaaaatcaactcaaaatgcattaaagattgaaacccaatactataaaactactagaagtaaacataggtaaaatgcattaagacactggcctaggcaaagattttatggctaagacttcaaaggcataggcaacagaaacaaaatatacaaataggactatattagactaaacagctttggcacaacaaaggaaacaatgaatgcagcaaagagaggatctgtagaatgggagcaaatatttgcaagctattcagtcaactcatatccagaatatatgacaaggaacacagtcaactccatagcaataataataataataatcccatttaaaaatgggcaaaggatctgaataaacatttcttaaaagaagatatacaggccgggcctggtggttcacgcctgtaatcccaacactttgggaggctgaggcaggggggtcatgtgaggtcaggagttcgagaccagcctggccaacatggtgaaactccatctctactaaaaatacaacaaaaattagccaggcgtggtggcagacacctgtagtcacagctccttgggaggctgaggcaggagaattgcttgaaccgaggggatggaggttgcagtgagctgagatcgtgccattgcactccagcctgggcaccaagggcgaaactccatctcaaacaaacagacaaacaaacaaacaaacaaacaaacaaaaaacatacaaatggccaacaggtataaaaaaaatgcttattatcactaattatgagggaaatgcagatcaaaacctcaatgacgtataatttcatcccaattagaacgactattatcaaaaagataaaaaataaatgctagcaaggatgtggagaaaagggaacttttatgcactgttggttggaatgaaaattggcacagctaatagggaaaacaatacagaggtttctcaaaaagactaaaaatagaactaccataaaatccagcaaaatcccactgtggatatttacccagaggaaagaaaatcaatatctgaaaggacctgcacacccgtgtttactgcagcattatttacaatagcaaagatataaaatcaacctaagtatccattaagagacgattagattaaaaatgtggtatatatgcacaacagaatactattcagccctgaaaaaggatgaaatgctgtttgttacagcaacatggatggaactggagggaggtcattatgttaactgaaataagctgagcacagaaagacaaatatgacatgttctcattcatatgtgggagctaaaaaagttgatctctggaggatagagagtagaatggtggttaccagaggctgggaagggtagagaaggtgggatgaggggaggctgattaataagtacaaacatatggttagataggagtgagttctagtgttccacagcatagtatggtgatgatggttaaaaacaatttattgtacatttcaaagtaactagaagaaaagatttgaaatgtctccaaccatagaaatgacaaatgtttgaggtgatggatacccccaattaccctgatcataacacattgtgtgcatgtatcaaaatgtcacatgtaccctgtaaatatgtacaattattatgcattagtaaaaaaagattttaaacaattacaacaacatccaggttttgttggttgtttttaatgcggcagaccctgtcctctattacattgaactgtcacacttttaagaagtcagtccaaactactatcttctttataccaataagaaggatcaggacacagaaagttaagtaaatggtccaagtcagtaaatggggattcatgattttgaaactttgtggtcagacttcaggtactgtcctcttaatgtcttgctgtgagatttgagatccaagataacttggcattgttgagatattgggaagctactatcagaatcagtcctctgcttgctttgttggtgtaaactagagataatttagtgtaaaatgtcccaataaaaattttcccccaagcatatgtaaaccacgacataatagatttatcaaagtagcagaatgctattatgttcaagagattaaccagaccaaagctatttgtcatagcaacgggtgctagagttgacaaattacaattgaacccagtttgtagcaaaatgttagacagagccttggcactgattaattgacgtgagagtccagcctagaatacattagagcaatttaaatatcattcaaaacagaatataaccatgctctctaaaacatcccaaactgtaccaagcaactacatttgattgattctataatgcaaatattttatgcctaagacttttaaagcacagactgtgttagtagcaagacacaccaccaatttagtaatttctaattaaaaagaaaatacattttacattaaatgcttatattgattgccaaggaacctgactacaggtcttttaaaacttgcatcatggggttgagagggacaatcatctcttagaaatttcttaaaaagaaactttaactctgggtaatgtgtttaccctaattagataagaaacctcatcctaataaaagtaatggactgaaggtgacatgtgttcagggagtcgggggggaaagagtttagaaagaggaaaagcctttgctttctaagctagaaaaatggatgttgaacttaaatctattcagacaatgatgagctagtcatattgtcacaagaataggttacctctttcttgcatttaaggttcccgttatgaaacagaaaacaagattatattctactgaaaataaagttgaaatggagtagaaaaagtggagtttcatattacttatcaattcttttttttttttcttttgtgagacagagtctcgctctgttgcccaggctggagtgcagtggcataaccttagctcactggaacctccacctcctgggttccagcagttctcctgtttcagcctcccaagtagctgggattacaggtgcatggcaccacagctggctaatttttgtatttttagtagagacagtgtttagtcgtgttggccaggctggtcttgaactcctgacctcaggtgatctgcctgcctcagcctcccatagtgctgggacccaattaattctttagtcaaccaacttcatttcttgatatgtcagttgtctgtgtgtgtgtgtgtgtgtgtgtgtgtgtgtgtgtgtgtgtgtgtgtgtattttcagtttttgtccatctgacagttgctgttgttttcattgttaggatatgagttccagttccagtatttctgtggcagagccttttgttctttagcatgtagggatttatttaggtctattacttgttttcactttctctttgccttttcttaaatttcaactttaataatagcctttaatagaataacagtgcattagctttcattgactacatgtatgctgaagaattcatgctaaagaaataataaggaatgtgtgccaagatgtggctatgaggatgtttattactagattgtttataatagcaagacagtggaaaattacccaaatggcctataacagcgaactgatgaaatcaagtatggtataaggctacagtggaattctcattagtttattaatcatttatcaaatattagttgagaggatattttgtatcagcccttgtggagtctctgaatatgtagccttcaagggcattaatagtgaaatggtggaagaatcgtcaatggcacagcaaaaggtgagcatatggctcggggagtccaaactcagtgtgatcttgttttcattaaaagataaaaggaaggtagaaatatgttttcttaagaaaaaaaaatgtacgtacacaaagataagcatcgctatgtttgactccttggatatttattctctaaatagtttgtaatgaattcctcatgtctttaagcaggaaacaaattgcaaatggtttaaaaaggcaattgctttaaaggattgaggagagcattggcacctatgtttctgttatctatgaaggtggaaggggaatcaagatggtttcagtcttttgtttttaaagcaaatggaattcttcaacatcttaactatcttttaactcttgctcttacaagaagtgatactttaatgtttaagaaaggcatgtattattaagaaaaaataagataaaataccaaggataccagcaatcacagcggactgagtggtatgtgaaaagataaacagtaaatgcttttggaaggaattgttagtcttctcgacagtttagcatttgatcttgttttgcgttggtagactgacttgaagtactagactgaattgggtgagacaaataaaagcatatactggagcagagagatccaatctttccctttctctgcaaggtttgtatttaggttataaaaataagtgtaggagggaagattagggcaaggcacagccttggtgcaagatgcagagatgagcagtcacgtatttcacacagagtaggatcagagattccaactagaaccaacaccaacagtgtgtggccccagggagtggcgctgcctctggtcaatgccacccaccagaattggactctaatggatagatcttcctagcactgcgtctggtcaatgccacccatcaggatcggactgtaatggagagatcttcttagctctctccctaaaagttgactgagccatctttccaattaataagaaaataccaaacagaacattaaagtttatagcttcacatttttgaattaaattacctattgattagtagggggctatcattaaaaattagcacaatcacgactgacaatgccttagaaattttcatcatgatgactttgatcaaattgtaaatgtgaatctgtactttattttagaactaaaggaggcaaatgagcaataaatttgaagcccaggtaattgggggaaaaagtaatcaatttaatccgtccgaagggctaagtgattcagagaactgacacttggatatttggttgaagccttttgtctgaaaatgtcacttgtatatgtttaagaaaatattctataccagacatacatttagtctttgcatctcttatgttgttagttttcagtttttaagcataaactcaaggtaacagttttcctgttagtttttagtttttaaacatacactccaggtaatagttttcctttctcccaatctcctttttttttttttttttttttttttgagacagagtcttgctctgtcacccaggctggagtgcagtggtgcgatctcggttcactgtaacctctgcctcccagattcaagcagttctctgcctcagcctcccaagtggctgggattacaggtgctcgccaccatgcctggctaatatttgtatttttagtagagacgaggtttcacgaacttggccaggctggtcttgaattcctgaccttgtgatccacctgcctcggccccctaaagtgctgggattacaggcatgagccaccacgcctggccctctctctccttgttgctactacgccatccagactccagtcactcaaagcaactacatctctcattccaagcaggtaccttcttcctcactctaatcccacattgtcttcacctctagactgatgatcatttatctctgacattttttgttcaaccacagcccacttatgcctgccttctcacgtgccgctcaagctcgacaactctacaggtgctaagatgaaatatagtgtagatgttaaaaggatttctctggagcctgatctccacatgtggttctatcttctgctagttgagttaccttgggaaattagcttagttttctgctacctctgtcttctcctctgtaaaatgtagtaacagtaacataaaaattccatagggttataattagaattagataaaataactaaataattgcaaataatctattatgtagagagtgataggttatatatgtagtgtctagagtgcagacttctagtgaaaatactgacttttggtcttcagtaaactagtaatatgtcaatgttggctttttcaaagtaatttttagcaacccttactagtgcacttagaaggtaaatattagcaaacagtacttaattgaacataccaccaccgacaatgaaattatggattacctacctgtaagaacaaaagaaaaggtgtgaatttttggattagtttatggctcaccagtgttacccctttacaaggtatacgcccacggtcgttatgttcaaaggttgaaactctagactactatatttaattctcctcaagaatcttagatatgaaaggaacagcaaaagtcattttatcaaaatttagtcctggtagaagaactccattaaacttggcatttggttatttgttttgggccccagtgatttgctaaagaataggttgagttctagagatagaaaaatagtaaggtaaagagccttaccccaaggggatagggggtagtcaggaagacaggcaaggaaacaggcaattgcaaaataaaaaccaggtgttaccagagtcatagtggctctcaaaggaggtacctctccttgccttgggtgggagtaagtgggtacaaagagaatttcagagaaaggtagcatctgagctgaaacctgaagaacaagtaggagttccccaaatgaagatagaggaatacagcaaagaaatttgcccagtgcaaataggaacatgcaagatagagaatgtgacgttcattcatggctgtttattattaaggtcctacaatatatcaggactgtattacgagaacttatgtaaatgtcagaccactgtctcctccacctctaaaatgagttttttcagggcagaaactgcccaatttatctttgctaacctaatgccttcagctcaatgtttatcaagtggaagatgttcaataattatttgttgaaggaatgaattaatcaataaatggtttatcacaatttcctcctgttagtgagaagcaaagtcattggaaaaaccatttaccagtatagggtcaggctagacacttgtaagcccatcaccagtgattactttcctgttggagagccatccattccatcagtattgtttggcacaaccattcaaccagcaaactgtatcttcatgggcctgtacacctgtcttattcatggatatttcacaagcgtaatggcagatgtgtgatttctgacctctcctccaacctggttgacttgggttatagcaacagagaaaatgagttttgcttggggttatttcttaataagctatcattgaccattaatcatcaacaaccacttgcctttccagtgtctcaccaattacgtatttcattctctgttctacctcccagcaaagtatcgggtctgttttaggatttacgtttttattagaatgtttgccccttttagcctgatagcacgtttatcattccaaaaccactggacggattccacacaaacattaaatgtttaaatgtgttcacactgaaacgtgtgggaatagcaaatggtcttttgttgtaacttttgaagatcttctgtaattcctctatttcatttgcatattgaagtgcttgcttatgttcaggaacctgtgcttagcgtttgtatatgtcctatggttcccaatattaatgagtcctggagaaagttgaatctgcaagtttctttacagtggccatcagggaatgaggtagcaggatgttaatgctgtctgcatgctgtgaaggatgataaactgtacttgggtgaccttattaatcactcataacgtgatcttaaaggtatgtgcattttctgtgcctcccagtctttgcgtatggagagggaaagatgggcattccctagtccccttaagctctaggtgccctcaatatctcccacttgagcatctgaacttcatctcagttttatgacagcagctggcatgcaaattggctggacttgaaagcactgaagttcacctcactttgctcaatctgtgcacaaatgatcaagctcagcaattttgaaaatggcccacccttttaaagggaaaacctgaaatattttcagtccttatggtagtcgggccaagcagtgtctggtagcccattcttagttctgttaccagcaggtaatgcaggttagcttgatgagcacaactctttgtcttctctccacctgtctctgtccattcattcatcccacggatgcttattgaatgtccactcaatgttggagcaacaacaggaaataaggacatggtttctgtccccatgggacttacattctacttggatatactagggagaaaaaagagtaaacaaaacaattagagatgataattattaagagtaaatgcatgggctgggtgcagtggctcacgcctgtaatcccagcacttttggaggctgaggcgggtaggtcacttgaggtcaggtgtacgagaccaacctggccaacatggtgaaaccctgtctctaccaaaaatataaaaattagctaggcatggtgacgggtgcctgtaatcctagctactcgggaagctgaggcaggagaatctcttgaacccagaaggtgaaggttgcagtgagccgagattgtgccactgcactccaacctggatgacagagcaagactgtttcagaaaaagaaagaaataaaaaagaaaagagtaaattaatgggatattgtaatggagaatcataatgtgtgtgttggctaaggttttcagaaaaaaaaaaattcatggtgacatgaaatttaagcagaaatctaaagtcctaaagaatgcgagggaatctggggaagcgtgctctaggctgatggaacagcaagtaaaacgacagggaatctgtgaacagtttaccttgcatgaggctctgaatgcagcacgtggtaagggagggggtggactaaaggctggaggaacagaatgaggccagaacacacaggctcctgcaggccaagatctgggtttgattgcaaacacaatatatagctcaagtttactttgtactcaacaaaatccattctgtctaccactggaaataatagcaaatacggcttgttggaaagtccgtgtgtaacttatctcttattattgctgagaggatcaggaaaaataactgttgagtattagactgaatacctgggcaatgaaataatctgtggaacatacccctataactcaagtttatataacaaacctgcacatgtacacctcaacttaaagtttaagaaaaaaagaatgctggtgggaatgtaaatgagtacaacctctatggaaaacagtacagagatttttcaaagaagtaaaagtaggtctaccattcggtacagcaatcactctacccaatactgggtctctacccagaggaaagatgcctgcttgcatatatttatcataacacaattcacaattgcaaagatacagaatcagccttagtgcccagcaaccaataagtagataaggaaaatatggtatattcaccttgaaatactactcagccataaaaaagaatgaaataatgtcttttgcagcaacttggatgaaactggaggtttcttctaagtgaagtaactctgaaatcaaaaagcaaatactgcatttcttcacttgtaagtgggaactaaggtatgaggatgcaaaggtatacagtatgatggacattggagactcagaagatgggagggtagaagggggatgaggagcaaaaaactacctatttagtacaacgtacactactcgggtggcaggtgcactaaaatcctagatttcaacactatgcaattcatccatgtaaccaaaactaacctgtaaccctaaagctattgaaatttttcaaaaaatatttaaaaagaaaaaaaagcaaaattttagatatggagaaaaaaaaagacatgaataagagcccttcagtccaaccagaatttgatttcactttcctctccttgtcattgtttttatacagctctttatctctttccaacagaaaaagtaaagaatttttccttttttatttagttttttaatgttcagagtggaaaagacataacttttcctacttgagcatttgtctgttttttcattgtaaatattattattgtccctgtagcctgggaggcctttcaaaggtcacttggccttttctagtacagtcacatgcccttcttcatttttaaatctttgagggggagaggggaatgagaaaatattccggaatagcactgtccaatagaactttctgcaatgacacccatgttctttatcatcagtgtctaatgaggtacctactagtcacatgggacttgtgagcactcacagtcaagctagtgctaccaaggagctgaattttaaattctatctaattagccacatgtggccaacagctgtcatcttggacaacacaactctagagcctcttctgaatgttatgccagtgaattcactgaaattcacaactggaatttacaccagtgatggtcttcatatgggcttccgttagtgactttggtgaagtttcaggcgagacctaaaggatgggaggggatctggggaagcatgttctaagctgatggaacagcaagtaaaaagatactcagtctgaggacacttgacctggcatgaagctctgaatgcagcccgtggtactagcccttggtaagtcgggggaggctgaaggctgaaggaacaaccttccagctcaattccaggtcatttctggtcatggcgaggtctttttcacaaaataatcattgttttcatctattcagtatccatttcctcatcctgtggtcctataattgcatttttcttaggggaccacctctcttgcatttttcctccatacttccagagagctggctccttaccgagctctagagttgggtatggaacctaaacctagccagctggcataactccaattcccagccacagggactggctcctagatgaccaagtggctcaagtctctccaaggagactcagtctcagaacacttgttaaagctgttagagactgaacacattgagcctgaaattgatggccatttctctgcccccctgagaatgtggccaacctcctagaaagaccacagggctaggactgagttccaattctctgaatgtagccctgctgcaatctataattatcctgaggtttttcacttatgtgaacgaatacatttctttttttgcttaagccaatttgagccagtgttttaatttaaaacctcacccccaaaaaaattctgatgaatacaataatgtcaaatatagcatttgtgacagtataaatctttcaaatcccaaagaactcatccctaagaaattatggagaggctaggtgtggtggcttatgcctgtaatcccaacactttgggaggccaaggtgggcagatcacgagatcaggagttcgagagcagcctggccaatatggtgaaaccccatctctactaaaaatacaaaaattagccaggcatggtgacgggtgcctgtaatcccagctactcaggaggctcaggcaggagaatcgcttgaacccgggaggtggaggttgcagtgagccgagatcgcgccattgcactccagcctgggcaacagagtaaggactctatctcaataataataataataataataataataataataagaagaagaagaagaagaagaagaagaagaagaagaagaaattatggagaaaactggacaaaactgggagtacagaagtggaaaatcacattgtgaaggagctagtgaattttctcccttagttatttagctggaaatatgaatccactgataaaggtggatttgcttggcccccgaggcagaggttgcagtgagcagagattgtaacactgcacttcagcctgggcaatagagctagactccatctcaaaaaacaaaacaagaccgaaaacaaaagaaacaaggacctcactttttactccatatacttttttttcctgtttttgcttttttaaacaataaatgtttgtaatttatatgacaataaagagtcttattaaaaagtatttcaaaaattttttttcttctagggtagatggtgtagttttcttattctttgaaaatacaaatataattgctccaagcaaatcaaacatataagagtgcagagagagagggaaaattcccccccagcccacacaagccttctaaatgtacttcccttcccagagaaaactactatgaatagtatctattttctatacattgacaaaaatatttagagatagtgggtatgtatgagagaaaaagatggatcaataaatacacatctacaaacatatatgatttggtttaaatatcgcctacctgtatatattcattagtatgcgtatgtacaggcatatatatgtaaaatatatatgtacctatatatatatatgtatatatgatattatgatgatattatttttctttttttttttttgagacttgctttgtcgccaggttggagtgcaatggggcgaactcagctcactgcaacctctgtctgcaggtttcaagcgattcttctgcctcagcctcccgagtagctgggactataggcacccaccgtcatgctcggctaatttttgtatttttaggagagatggggtttcaccatgttggccaggctggtctcaaactcctgacctcgtgatctgcctgcctcgggctcccaaagtgttgaggttactggcgtgagccactgcgcccagccaatattacttctttttctgtttaacagttgatattgtttggctgtgtccccacccaaatctcatcttgaattcccacgtgttgtgtgagggactgggtgggagttaattgaataatggaggcaggtcattcccacgctgttctcatgatagtgcataagcctcatgagatccgatggttttataaaggggaatttccctgcacaagttctttctttgcctgctgccatcgatgtaagatgagacttgctcctccttgccttccaccatgactgtgtggcctccatagccatgtggaactgtaagtctattaaaggtctttctcccgtaagttgcctaggcttgagtatgtctttatcagcagcatgaaaacagactaagaatacagcagtacatcaggaatattttccatgagctacatctccactgcaacattctttttagcaacagtgcagcattctgtagtttgtatgtatatccttaatggtttatcacccgccttttaataaacatcaggctgtttcctgtttttgcctattcgtgacaatgctgaaacagcttcattgcgcataagcaagacttctctatggcatctccaaatgatgactgttggctctaatgtataatacgagtgtatcttccatatccctctctgctaatgttccctgctgatgtaggataagcttctgtggcttgatcttggctgataatttgggtacaaatctaacaaaggcatgagatgtgttctaaacttacctctagaaaagtcagggttttttttgcagcaatgatgccacaaaacacattctgaggacaactcaccacgagtttgaagatgatttgtttggagcgatttgaaatcaaagttcagatttatttctcataagtctgttgtttagagggggatttcgtgaactgttcctatctatgtgccttatgcctgcaggctacaggtcctttatgagatggctatttttaaaggaacacctctattctcaggatggttgacaggacttttaatgaggaaagaaattagaaatcagagctggaggcaaagtggtcagcagaaaggaaagaaaaacaaggaacttgtattaagcagaaaggcagcttagtataccctttcaagtgtctgttattgtaaatattcttgtatatatccattagcagtcatgggtgagaactacagaattttttgggttatcatcataggaaagtacttaccacatctccacaggctcctcattttacttaaacttgaccaaatccagtagcaattgaaactgtacaaatcaaataatgtatttaatgcaacagggcaggggttggaaaactgcagcctgtgggccacatttactccacttggattattattatttctgtaataaagttgtattatgtatacccagctgcacctatgcaagcatatatttctgcggcagcttttgggtaccacggcagagctcaatattaggatagccctgcaagtcgaaaatattttctttctgcccctttacggaagatgttcgtcaacctagggaatctcacaatttcaaggtgttccctgttcaatttttttttttaatgtgagaaaagaaatcaatctctactcagaggctgcagagccttcctgggaggagagaagagtccacaaagttctccgtctgcctgggaggcagatgcagatgagaggaagtggcataggctgagctgtacctgctggattcattcttcttgtctccccagttgggaagttaaggaagttactctttatatgacagggaggaaatgagcaatggagagagcccatttctaaatagtagggctgaagtctcccatggataatgcaacacagttgtcagtgacacaaaatgatgtgcttgggtctgagaattacctcttatttggaggccgaattgtgtctccactacccccgattcaaatgctcaaattctcacccacaggacctcagaatgtgagtctgtttggagacaggatccttaggaagttaattcgggtttcatgaggttattaggttgggcccgaatccagtgtgtttggtgtccttataagaagaaaaaatcagaacccagacacacagagagaataccatataaacaacacagagggggaagatggtcgtctgcaagccaaggaaagaggcttcagaagaaaccaacactgcaaacaccttagtcttgaacttctaccctccagaattgtgagaaaataaatttctgttgtttaagccacacagtctacggtgctttgttacggcagccctggcaagctgacacacttctgctcaagtctatgttggtatcttcttagatatgatgcagatagtacacagatctttctgacgcctaagtcagcagccctggcaagctaatacacttctgctcctgtctgcattggtgtcttcttagatatgatccagatagcagagagactttctgatgcctaagtcagcagtcctagcaaaccctagcaagctgaagccaacacacttctgctcaagtctaccttggtgtcttctcagatatgatgcagatagtatagagagctttctgatgcctaactcagcagttctcaactgtggacaattttgctcctcaggagacatttggcaatgtcaggaggcatttttgattgtcataattagtggagcaaggcactataatgctactggcgtctagcgggtggaggccagggatgctgtttaacatctcacaatgcacaggacagccccctatgacaataagttacccagcctaaagtggcaattgtaccaagactgagagttcctgatggggcagaagatgcattactgtcaggctgtgtcttttcccttctccccattagacctttggtgttctttgaaggggccggaagaggttatctcctactctgggcattgtgtagaatagctatataagatcctcaaaataattgaaacggaaagactcccttcggctctttctgccattccagtaaattcctgctaagtatgctctaggaaaactatgaggtgctgtatgatttctgtgacaggaactgtggctttcctgaggaacagtcttcctttcaatgctgttaacttcccccaagtttgtggtctgttggtggttccggtgtgggcaaagaggaatgaatgattgatggactgtgagcctcccaagtagaagtgggctagtggggagtttttttaatatcatattttatatacaactgcaggtcaggccaggctatggatatacagtgcctgaccctagtacagaggaaggatcgattgtgctcaaacagtgagctatccaaataatttatttatgcagcaatgcagctgtctgcttctttggaggtgggcacaggctggaagggttttgtgtgtgcgcacgtgcgtgtgtgtgtgtgtgtgtatgtatgtgtgggcatggggtgcatttgtatgtgtatgtgtgggtatggggtgcgtttgtgtttgtatgtatatgggtgggtatggggcgcatttgtgagtgtatgtgtatgtgtggggtgcatttgtgtgtgtatgtatatgggtgggtatggggtgcatttgtgagtgtatgtgtatgtgtgagtgtggggtgcatttgtgtgtgtgtgtgtgtatgtggactttgagtgcatttgtgtgtgtatatgtgggtgtgggatgcatttgtatgtgtgtgattgtgtatgtgtgggtttggagtgcatttgtgtgtgtgtgcatatgttgggatgtggggtgcatttgtgtgcgtatgtgtgggcctggggtgcatttgtgtgtatgtgagtgtatgtgtgggcatgggatgcatttgtgtgtgtgtgtctgtgtgggcgtggggtgcatttgtgtgtgtgtgtaagtgtgggcttggagtacatttgtgtgtgtgtgtgtatctatatatttgggtgtggggtgcatttgtgtgcgtgtgtgtgggtgtggggtgcatatgtgtgtgtgtgtgtgattgtatttgtgggcatggggtgcatttgtattgggcttggggtgcatttgtgtgtgtatatgtatgtgtgggcgtggggtgcatttgtgcgtgtatgtgtatattggggtgtggggtgcatttgtgtttgtgtatgggtgtggggtgcatttgtgtgtgtgtgtgtgggcatggggtgcatttgtgtgtgagtgtatgtgtgggtgtggggtgcatttgtgtgtgtgtgtgggcatggggtgcatttgtgtgtgtgtaagtgtatgtgtgggtgtggggtgcatttgtgtgtttgggtatggggtgcatttctgtgcatgtgtatgtgtggatatggggtgcatttgtgtgtgtgtgtgtgggcgtggggtatatttgtgtgtatctatgtgtatgtgtgggagttgggtgcatttgtcttggggggcatagggtgcaattgtgtgtgtatgtgtgggtgtggggtatatttgtgtgtgtctatgtgtatgtgtaggagttggttgcatttgtgttggggggcatagggtgcatttgtgtgtgtatgtgtgggtgtggggtgcatttgtgtgtgtgtgtgtgtatgtgcatgtgtgggcatggggtgcatttgtgtgtgtatgtgtgggtgtggggtctatttgtgtgtgtgtgtatgtgtatgtgtatgtgtgggcatggggtgcatttgtgtgtgtgtatgtgtgggtgtggggtgcatttctgtgtgtgtgtatgtgtgggcgtggggtgcatttgtgtgtatctatgtgtatgtgtgggagtttggtgcatttgtgttgtgggggcatggggtgcatttgtgtgtatatatgtgtggatgtagggtgcgtttgtctgtgtgtatttgtgtgggcatggagtgcatttgcgttgcgggggtgtggagtgtgtttgtgtgtgtgcacacgcacatggttctcatggtcctcccgttttcaactgaacctgtaattagctcctcagagaccaggtaatcacagtttgctttttctacctgtaaatgctcattggctttctgatttcccattaatttcctagctttaaattaccaagaattggactttttgtaaaataccaagttatcggaacaaagaccggcactctgggaaggcaaatgaaaaattccagtgtctctgtaactgagattgcctgttattagtaggtttctctgtctgtttggttttgtctacatttgaaaggaagcttttgaggaattcatggagcatgtctactctattccctcccaggtgagatggtgcccctccaggaaagtatcagaatgcagccattagggctggacatttctaactggccaagtctacacaggcataacaaattgagcaattgtggttatgatcacaatttctaaaactgggactctaaataataggttccagaagcaaattaaatatcaacaacccaattaccttttgtctctgctaccaagcatgaattctgatagtcattgtcttacttctctatgttcagagaattatatttaagggaagaagcagctaatgataatttactgattgttacaaacaatctacatgtcagctatatagagtcatctataggaattaattgtatgagctatatatgtcaggaatatatagagtattcttgacagtaaattagcattagcattaaaacgattagtattataattttataatactaattataactattagttaattagttcaactgttgagttgaactttctgcaatggtgggagtgttttatacctgagctttccaatatagtagccatgagccgtatgggcctactgagcatttgaaatgtgattagtgcaactgaggggcttttaaaataattttagttaatataaacttaaccccattgagtagtggctaccatattggacagtatacgtctataggccctaatctcatctcctctttaaaaagaatgaatatgtatctttattaataatctgtgttcatatcttatataacatacctaaaaatgtagacaaggcagggcgcagtggctcacgcctgtaatcccagcactttgggaggccaggtctggcggatcacgaggtcaggagatccagaccatcctggcgaacatggtgaaaccccgtctctactaaaagtacaaaaaaaaaaaaaaaaagttagcctggtgtggttcggacgcctgtagtcccagctactcgggaggcaggagaaaggcgtgaaaccgggaggccgagcttgcagtgagctgagatcgcgccaccgcactccagcctgggcgatacagcgagactctgtctcaaaaaaaaaaaaaaaaaaaaaaagtagacaaaaagcctacaaacagacacacccaactgttaagacctctcaggttgggattagaaaggtatgaagaaaggattttaacatcttgtcttgcctaatcccaaaaagaaaaaaaaataggtgataagattaaaaatgaatcaaataaatcagatgcaaccaattatatcatggaaccagttatgtcagtccatctctttgaattaaaattaaaggaaaaaagatggagggttctgacagttatctctctaatcgagacagccctctccctctctctgtccccttacagagaaagtgaatttgggagcttcggtcaaacatcccttgtctttcgtcaaattagtgcctaatgtcatcattttggtggctttcaaaggtgtgaaccagcaaacgggtgacagtgagaggaaggaacaagcatgtgaacaaatgcgtgaaccacagtcagtctctgaatggaaatccatgtgtcttatgaaaatcagttattgttgaaagccatttgcaaagcttccacgatcctcgcttggctggtgcacggctgtgagtgcttctttccaagtctcctgtgggtgacggggaatggctaaccagggattgtgttcacaggcatatcgattccaagtctgatcacagccacaaatttctttcccaggttagtaagaagaaatcaacactttactttcttggatcatatgtttttaaacattagtactgaggaaataaagaaagggagagaggaagaaaaaagaagtacaagaaagaatacactgggctgggcgtggtggctcatgcctgtaatcccagcactttgggaggccagtgcagacagatcactaggtcgggagatcgagaccatcctggctaacacggtgaaacccagtctctactaaaaatacaaaaaattagccgggcgtggtggcgggtgcctgtagtcccagctactcggggggctgaggcaggag[135 bp omitted]caaggagaagcaacacagtgcaattctttaaagtgcatacaattaaaacacatagaagaggaaccttggctagaattacagagcttgatcaagtctcatccatggttgacactgtttgttggatgatttggacatttggagcctctctatgtggggagagttttctttatccctttcaaatcggtatgccatctctacatacctgaattattataaaggtaacaaggttataagctcccccatgcctgccaggatgcactgctttgctgtgactgagccacactaggtgctaaacttttctgcactaatgcaatcaaattagaagttaaatctgatactgtaacaagttaccacctgggaacagaaatgctttgctgttttattttttcttcgtagcattgtgaaatgaacatggcatgtggcacattttaattacagcaaatattaatttttaatgggaaatgtacacctggctttgtattgttcataaattatctgagaggttgaaatttatttacgtgattttgatgcagttgtaattaaagtgaagaaactaatagccttctgtaattgaaggcacattaatctgaaagctacctgagggcagggattctgtgttaaccgtgttgtatactcaatttagtaaaatacgagtcttgggattagtggtcttgtatgcgatgtgctacacattttccagatatttctagggtattttctgagctttagaaaagtgataatatgatctagtactgtaggtaattatgtgctaagaaaagaggattctatcacattatctggcattgcttttttagttttgtaatggagtaattgattagtactactgcattttagcaaggtattttgctcctatacctagtggatgatgtttaagttaactctatttgtgtgtccctgagaaagagaaccgaggcaggcgctcggggaatggaacagggacaaagaaaccaaccaaataacactaggtatcagttttcagctgcatgtaaactcaacttattttttaatgattttattaggaagctttctacattctattttgtaatgcatttccctgagggaactttagaccttgcaggcctgtttgcaattcctgtcagattaggggggaaagaaagagaacagaatgatggaaatttcacacgttattcagtgttttaaaaatccagtttcttagcctgacagtttcttaaatctgtagaccttgatgttttaatcttatgcattctgatggagcttgatattcataactggtgggcttggtaaatttttaatcaggaagttgaatatgatgagaaaacacaaggggaggtttgtgttttgcaccttgtcatcaagctttccagtttcattttcactttttgcactaagagtattcctcagaggtgtcagagctgcccaaagctgacttccatccatattgaaatgactttttctgagctttccaaaattccaatttcagtgcaggtggtaatatctgaatgtgagcagcagaataaatagcagtttaaaactcatataaatatacatttatgctccatgtgtgaactcataaggtgtgggataaatcttgtcatttcaacataaacggaataacaaatagattgaaagtgggatgcactgttgcgaatacatgatctggatgcgcagtgcgattaaacagtgatggcttcatgagaatcgaatttcaaagatcacacaatcgattaaaacaattcagtctccctggtcatttttgtcagtaaattaaaacattaatttcatcccaagaatgtttttcagtgttttttattgtacaaagtaacaaacacatgcaaaagtagagaatagtaacatgattcctcatgtacccatccccagattcgataattaaaactcatagccaatcatgtttaatctatatccccacttgttttctccacattcctgaattgttttaaagccaaggccagacatcacacattttatccataaatgtttcagtatgtatctctaaatataattacacccaatccttcaacattaacattgattccctaagatgattaatatctgatcgctgttcagattttcccagttatcttacatatttataaagtttccttgaactgaaatccaaacgaggactatagaatgcaattagttaatatggctagagttccttagtctataaagagtaaagaactttccattcatattttactctcttttttcttagaattcttaaattaaagaaactagattgtcttcctgagtcttttgtgaaaaatatgattgtgaattttcttgtttatcgcacacaataaatccaccttataaattattgattgaaccaataaaacctatcaaaacaatttaattgaatacacatacaccacacactctagttttttttttatttttaatttttatggttatggaagagttgtacatatttatggggacatttttataaaagcatacaatgtgtaatgatcaaatcaaggtaattgaagtagcctaactttaaatatttatcattttgttgttttgcaaacattccaaaactactactctagttattttgaaatatacaatgcattattgttaactatagttgtcctattgtgctagtgaatactggatcttatgtcttttatctaattgtatttttgtacctatgaatttacctacttctaactcccccttgctctcaactccccttccttgcatttggtaaacattattctactctgtatctccatgagatcaatttttttagctcccgcatttgtatgagcacatgcaatatttgtctttctgtgcctggcttattttagttggcatcatgtcctccagttgtgtctatgctgtttgaaatgacaggatgtcatgcttttttgtggttgaataatattccattgtatgtatgtaccacattttttcattcggttcatacattggtggacactcaggttgatttcataacttggctgttgtgaagagtactacaataaacatggcagtgcacatatctcttctatacactaactttctttcatttgaatatatacccaacagtgagactgctaaattatgttagtgttagttttagttttttgaagaacctccatactattctccagagtggctgtactaacttacgttcccaccaatagtatacaagggttccctcttctccatatccttaccagcattcattattgcctatctttatttatttatatatatatttatatatatatttatatatttttatatatttttatatatacttttatatatttatatatatatttatatatatttttatatatacttttatatatttatatatatatttatatatatttttatatatttatatatatatttatatatatttatatatttatatatatttatatatatttatatatatttatatatatttatatatttatatatatttatatatatttatatatatttatatatttatatatttatatatatttatatatttatatatttatatatttatatatatttatatatatttatatatttatatatatttatatatatttacatatttatatatatttatatatatttacatatttatatatatttatatatttttatatatttatatatatttatatatatatttatatatttatatatatttatatatatatttatatatttttatatatttatatatatatttatatatttttatatatttatatatatttatatatatatttatatatatttacatatatatttatatatatatttatacatatatatatttatacatatatatatttatacatatatatatttattcatatttatatatatttatacatatttatatacatatttatatacatatttatagatatatttatacatattatatatatttttatatatatttatatatatttatatatatttatagatatatttatatatacatttttatatatatttatatacatttttatatatatttatatacatttttatatatttatatatacatttatatatatttatatatacatttacatatatatttacatatttatatatatttatatatatatttatatatatatttcttttttgttttttgttttttagttgttggtttcttttctttcttttatatatgtatatatctatattgcctgttttttcagagagctattttaactggggtgagatatttcattacaattttgatttgcatttctctaatgattagtgacgttgagcatttttccgcataccttttggtcatttgtatgtcttcttgagaattgtctattcagatgtttgctcatttttatttggattatttgggttggggttttgtaccaagttgtttgagctcctcacatgttctggcagttattctcttgtcaggtgggtagttggcaaatgttttcttccattttgtaggttgtcttatcacttgtttgtggttgcctttgctgtgcagacactttttagcttgatgtgatcccatttgaccatttttgctttggttacctgtgcatttggtggcttactcaaaaagtatttacccacacccatgtctggaagcatttccacagtgttttcttgtaatagcttcattggtccaggtcttacattaaattctttaatccgttttgatttgatttttgtagatggtgaggaatagggacatagtgtttggtcttcattatgttgatatgatatgtcacatttattgatttgtctttgttgaaccatccttttatcgcaggaatgattcccatttgatcatgatgaatgatctttttaatatgttgaatttgattcggtagtattttgttgaggatttttgcattcatgttcatcagatatattagtctgaagttttcttttttcgttgtgtatttgtctagttttggcattaggataatcctgatcctgtagaatgagtttggaagtattgtctactccttgattttttagaatagtttgaatagaattggtattaagtcttccttaaatatttggtagaattcaacagtgaagccatcaagtcctggccttttctctggtgagaatctttttattacttcttttatagcattacttattgatttatccatgtttactattatttcatgtttcaatctttgtagttttttatgtccaggaatttatccatttcttccagattttccaaatcgttggcctatagttgataaaaatactctctaatttacctttgaatttctgtggtatctgttttaatattttcttagctctgatttcatatatttggacattctctcttttttcttagcgtggctaaaggtttgttgatttcgtttttattttccaaaaacaagtttttattttgtattttctctcaatttcatttatttctgctctgatctttagtgtttcttttctttgactagttttgggtttagcctgctcttacttttctagttctttaagatgcagttttaggttttttgttgctgctgttgttgttattgttgttttttatacggagccttgctctgtcactgggctggagtgcagtggtatgttcttggctcactgcaacctccgcctcctgggttcacgtgattctcctgcctcagcctcccgagtagctgggactacgggcatgcaccaccacacccagctaattgttgtattttcagtagatacagggtttcgccatgttggccagggtgatctctgtctcttgacctcgtggtctgcccacctcgggctcccaaagtgttttgttttccttttttgatacaggcatttattgttataaactaccatcttagtactgcttttgctgtatcccataggtttcagtatgctgtgtttctactaaatttccttcttaaattatttaattcatccagtagttattcaggagcatgttatttaatttccatgtatttatatagtttccagagttcctcttattgatctcttcatgttttctattttttcatggttcaatcttggtaggaattttatgtcccgggatttttatgtccaataaatgcttattgatttctagtttcattccattgtggtcagaaaagatacctgctatgatttggatttttctgaatttctgagacttgtgtttcggcctaacatatggtctaccctggagaatattttatgtgcccatgagaagaatgtgtattattcagctatcgaatgaaatgttttgtaaatgtctattgatcaatttgttctgtagcgcacattaagtcagatgtgtctttgttaattttctttctaggttttttgtccaatgctgaaagtggtatgttaacttagcattcccaactatcattgtgctggggtctgtttctctctttatctctaataatatttgctttatatatctgagtgatccagcattaggtttatatatatttacagttcttatatcctgttgctgagttgacttctttatcattatataatgaccttctttgtctctttttacagattttgtcttgaaatatattttatctggtataagtacagctctttatgttcttttttggttttcatttgcatggcatatctttttctgttctttcattttcagtctgtgtgttttcgtaggtaaaaatgagttccttataggcagcatatagttgggtctttttaaaaaaaaatttattcagctagtctgccttttatttggagaatgaagtccgtttacactcattgttattattgataggtgaggacttactaccgccatttagttgttttttgttgttgttgtcattttgttagttctctcttcctttttttttttcttcttgtcttcctttctatataagcaattttctggtaatgttttaatttctgtcttttaatttttttgtgtccctgttaaaggtttttgctttgtagttaccatgaagcttgcaaaaaaaaaaaaaaatcttataaccaattattttaaattgattaaagcttaactctggtcacaaagaaaaaacattaaaaaggagaaaactaaattctacgctttatctccatctcctgcagtctgactttttgctatctctgtcttttttactgtctttcaacaaattgttgtagttattattatttttcataggtttgtcttttagtcttcgtactaaagatatgagggctttacatacaattataatattagaatattctgtatttatttgtgtgcttgcttttaccaaggagctttagaccttcaggtaatttcttgctgcacatttgtacccctgtctttcatattgaagaactcccttcagcattccttataagacagatctagtgttgatgaattacctcaggttttgtttgtctgagaaagtctttacttctccacgtttgaagcataactatgctgaatataatgttctagctttgaaagtctttttgttcagcactttaaatatgtcatcccactccctcatggcctataaggtttctgctgagaagtctgctgacaaacatttggacttctttatattttctttgcttattttctcctgctactcttagggtcctctttttgtccttaacctttgagaatttgattattgtatacctctgggtttcatctgcttggtgttgcttgactttcttgtacctggatattcactgggtttgaaaagttgtctgttatttttttgaataaactttctatcccaatctctttctctacttcttcttcaaggccagtgactcttagatttgccgtttttaggttattttctaaatattacaggcatcttttgttcttttttagcttctttttttctctacagactgtattttcaaatagcctctctttgagctcactgattctttcttctgcttcaccaattttgctgttgagacactctgatgcatttttgtgttgttgattgcattcttcagctctgcaatttctgtttgatttttttgttattataatctctttgctagatttatctgatagaattccaaattcctcttctatgttatctccaagtttgttgagttttctcaagacaaccattttgaattgcctgtctgagaggtcacatatctctgtatctctaggattgatcactgatactttatttagtccatttggtgaggtcgtgttttcctagatgttctccttgcatgagggcatttgttaatgtctgattttttttttttataaaggtgctttattgtgtggatagttgttcaatttggtgttcctgtggtcgggggttgtggggaagtaaatccctggaattttctatttagccatcttgttccacctcatatatttcattgttttaagaaaaatgagtagaagttgaaagagttgtataagagctaagtgaaggtcggctggagttattgtcaccaagcactcttctaagttgcttgaaaaatagcacaagcagtgtttcttaactgctcatataggggatctttcttccttgggtaaactcatggttggcattgacattgatttgttgcacttctgagtgaaaaaaaataggcatttaacataaaagagattactcttaggaaatactggatgtgactttagaaagtggtcatggttccttccaaaaatattcattattaaatatagtgttatatttcatttctgaacaaagagatctacgagatctggtctgctctggagaaaaaaaatgacaaaggagagaatttgagggaatctcccagtccgttcgtaactaacataagagtttatgcaaaacaagaattattctaaacaccatggatggtgggccataagccatctcatttatccagacatctctgtggttcagcaaatttcccagttgccctgtgtatagagcttttagggagtggagttattgttgctaaggagaggtcactgtttttaggctgggcaaaactgcattgatccttaggaagaatctagactagacaattggcaataaaagccatttgcatctgggcaacacctttccatcctaccttccccaaagcacactcagcagtagttcctcttaccacttaaataaaaacttcaacatgtggggacaagttttccattaaataagctatttttcctttgttttcaactgcacaataaccatcagaaacacttacctaatatttatttccacgttccatgtaccatgttccatgtgagcatgttacagccactgtccagtttaatatcatatgaatatgaaataccaattccactattgttatcatcattttccagatgaggataccaaacaaatgcaggaaacaatgagagcatgatgagaacttactttagaatacagagctagaattagactcaaagtccattagactctaaaactgatgctgctcctcaggctccgcttagcatttacaaaaaatggcactgtgactgaggaaccttgtgtacatgcatgtgacttcccaggtggcacttaccaacagaccatccttccaaatagctgctccttaaacaccccatcttgagcttagagacacacacaaatggtagtgtctgcactggggaggatgtacctggggcagaagcctgttcagggcctggagtgggctttgtcactttggcaaaagtctgcatgactttgggtccccctaaatgaatggagttcgggggccaggcgaagattcccatgaccctgttgactcctcattccttggggaggggtatgtcagaagagggtcagaactggaccctcacaagtatgggcctggccaggagacggggctttttggctctgagatctcttaaccacttgttataattcttcccacattacaaaggcccacaatgtacccccacaatgaggagagtccctgttgtcccagacagcattattcttcttgtacctttgggcttcatgcatcatttttcaggaggtagatcaagtggaagaaacatttttacagggaaaaagcagaaaaataacaacaaagagctgtgtagccccttaaaagactgtagctgtgaacatttcagacagagttcagagatcctggaaaggaaacagtaagccaaaaaacctctccaaaaattaataataaggacaaagctggttcccctgatccttatgaaggggatgaggagaatggatggtgctctgtgcgcatttagaggtcaagtaggtcaacaaagttctgttttccctgaatggggaccctagcactacggtgctcccatctagctctttccttaaacagttggaaatgagatacttaaagaaactccacccaatggaagtggacatgaggtcacatcgagggtcatggtcacaattgactaaaagggtagggaattgatttgaggatagcatatttcagaccagaaggaagagaattgcttagccggcaggcttttttacttttaaaaaaaaaaaggcttattgactcttagggaccttatctgaaagtgtcatgaccatgtctccctctgcacaggtcacccatctcactaaaaacttcctgctttggggttcaggttggaatgtcagaaatacattagttgatttgaattttgaatacgtgaaaagaaagcatccctcatagattgtaccttcaccgaaatgcaatgatttcctgccccaattgagtgctctccaagaaacgttgatgaaacatttatcagatgtgtggagtgaaggtcgtatgtggcacgcttggacagaaataagctggataaagcaggcagcattctctatgcagttccctaactgatcggcccgttctaggcagcataatcttaagagcaaaagccaggttggtcctgccatgttcgtgtattcatcaataacagcacataaagaagttctttcaacttaggattttatgcagaaacggtgaaatgattaacatcagaaatagcaacaatgccgtgtgatttccaaaattattttatttttctcctggttatacagttagagtgtgaattggagtctccctgtggttaagttgaagttgtgtgactgtatgctgggcaatagaaattgggtgtaaactgtattaatttgtgccaattccagatttagccgtaaatcacctgtgacacccttcacagtctctgttctccatccactgtgaccttggaggccaggttttgaagacacgttattacaagatgaaagagattgcatccctgagtgattcatgatcgtagcattccattgattactctaaaccaagctgcaaatgagcacagagcttctgctggcttaatccccaaaacctggagttgtaaaggacttagtcttcctccataatacaacttaatccacgtctactgaaatagaagtatatttatattctataaagttaacataagcgtaactcgatactatagagagaagttttaatattaatagccaatctgtcattactaaacagctggtgaaaggccaatgaggccgggcacggtggctcatgtctgtaatcccagcactttgggagtccgaggtggggggaccgcttgaggtcaggagttcgagaccagccagaccaacatggtgaaaccccatctctactaaaaatacaaaatttggcaggtgtggtggcgcatgcctgtaatcctagctactgggaaggctgaggcaggagaaccgcttgaacctgggaggcggatgttggagtgagctgagatcgtgccagtgcactccagcctgcaacaaaagtgaaactccatctaaaataataataataataaaataagccaatgaggtctgctgcatcatacctgttctgatttgaataggatgtcccttttccaaaattccccagcatctgcagagtattttattcaggttcaacacaagctggtgaggcatgtaactaccttgtaactagtttcataataattattatcgtctctctgaaaatagtcagcctgctttggacacaggtgctgcactgattttttttttattattatttatttattttttattttttatttttttgagacagagtctcttgctctgtcgcccacgctggagtgcagtggcgtgatctcggctcactgcaagctctgccttctgggttcacgccattctcctgcctcagcctcccgagtagctggaactacaggtgcctacgaccatgcccagctgattgtttgtatttttagtagagacggggtttcaccgtgttagccaggatggtctctatctcctgatctcgtgatccgcccgcctcggcctcccagagtgctgggattacaggtgtgagcgaccgtgcccggccccccactgatttttctgaggatgcctctgtgatgtcatacgatgtgccaatttccatcttatgtcctaaaatggcatcgcctcacttctgagaaatactgtcactctgtagctaactctctgctctaagaactcagcgtccccaagccaacttcccgagttcctcctagcattctctattctttccgccgcacaatgggacatgtggttttattccctgaaaagtcacttctggatggacccagtctgaagatggttctcctgctgtatagaaacatggatgtcgcgaaattgcctattaaacagggaagctattaaacagcctccctgaatttaccagattaggattttagtgaaaaattaccgcctgcccactgcttgtgggtagagtgttcttcagaagaaacattaaggtttaaagactgtaagtcatgaaatgcacgtgacaagatgaatgtcattgtatcatttcccaagccgcgatccccatggttcaccagaacttaaatacagcagttgatatttatagccagtggtataagaccttgtcttcaaggtggtgagtttccgctttgagatgtattccagaatgttacaatgttaaggggtcctaggtgttaatatcaattttataatttttaagacaaagaaagtgaagcgtgtggaaggcgagagaaacactaatggtgtcaagttggtattttagagagaagcagtcatttcattctcagttattacctatgctggttgtgcaaatttaagcaaattattgcactcaataggcgccattttctgtatccatagacagtggggactgtttgactcagtgctgtgcccatctttgcataaaaggcatttttacatttgtgtgcattggtgtgagttgtctgtttcttttgcccattttcatccttttcttgtttcattttctccatgtcttcgaattttcacagtaatttacacagaagtctgcatagtagtctcttagttttttaaaaaatcttctgtttgaatggtgatcctcttgtaatttctcattttctgtctttgtgctttctcccacctttttcttcattaagtggttagctactttttttcttattttcaaaaaatacccttaaaacatatgatttggtttattaattagatctataattattctcttccctaacttattgatttctggtcttccgtaacttactggtttcttacgtttatgaatcctttcttaagcttttttgtttgtttgaatttactgttatttttctaaatttttgagatggagatttaataaacttatttatatttttctattatattgaaatttttcatgctgtgaattttcttctggttctgatttaaatgtgactcttagattctggattttattttattctattattattattattattattattattattttatgacagactctcgctctgtcagccaggctggaatgcagtggtacaattttagcttagtgcaacctctgcctccagggttccagccattctcctgcctcagcttaccgagtagctggtattacaggcacccgccaccatgcctggctaatttttgtatttttagtagagatggggtttcaccatgtttgcctggctggtcttgaactcctgacctcaggtgatctacccacctcggcctcccaaagtgctgggaatacaggcgtgaggcactgggcatggcgccctccatcgttctttttgttttgtttgcatcatagtttgcaaagtgtggttctcctttcctatttagcctctattcccccaaaccattgttttcccaacactgccttctccaattcagcacatgtttttaagtctctttactgtagttaggactctgagcttcctgttctgtctgtcattattttcacttgtatggtggatgtgatttcagttcagtcttggctctccatccctcctcttcttcttctcctgtgtctctagaccctccttattcttgtcaaaagctcaggatgggaaataggaaaatagttctgctagagggtggtatttattttcaaatcacagttatttaactttatagttttgtgtgtgtcaccaaattatggtaaaggatggtatttgtgtggtttattttttcctgtttatctttttttttttgcaatggggtctgactgtgtcacccaggttggagtgcattggtatgatcttgactcactgcgtcttctggctctcaggttcaggtaatccttccacttcagccttctgagcagatgggaccacaggcatgccaccacaatacctgactaatttttgcattttttgtagggatggggttttgccatcttggctaggctgatctcaaactcctgacctcaagagatcctcccgcctcagcctcccaaagtgctggggttactggtgtgagccaccacacccggcctgttcttgtctatctttatagagttggcagaagatgctaggagattccagctgccattgactcagctgcatggaaattgcttttcttttttaatacattcattatatatgattagttattgattattcattttaaaatactttgcatcaaattatttctctttccaggcaggactggctgtctaataggtgcagccctgtgaaaatgaaagttcagggccccttcctaaaaaattgtaaagaacttcaagatggcgaaagtagagcatcacgccagtcacattggctcacacctgtaatcccagcacttcgggaggccgaggtgggtggatctcttgaggtcaggagttcgaaaccaacctggccaacatggtgaaaccccatctctactaaaaatacaaaaatcagccaggtgtagtggtgcgtgcttgtagtcccagctactcgggaggctgaggcaggagaattgcttgaacctgggaggcagaggttgcagtgagcagagatcgtgccacactgcactgcagcctgggggaaagagtgagagtctgtctcaaaaaaagcatcaaaccaggtgcaggaccctttgagtggcatccctgtgtgtacacagtcatacctccaggaaggtggtactggttcaatacttttatatattaagtaactcttgtttaataactttatatgtgttaagttatctaacacagagagagagagaactagagactggaacttaggagagccgaattctattcccaaatgtgtcttggatttatagtctgactttgaactctggagttctgttttcctacttgaaaaatgaaagattttaccctgaattgcgtttcacgaactatcacatatattactgataatacctaaatacattttaatagtggtattaattatatcacataaatagaaaaaaattgaaacacataaactatgctttttctgtatattttttcttagcaggtagttaaggtgagtaataacaaaacaaggtcaattttaaagcactattggagaattataggtgatatttagattttgtaagaattgtgaagattacataaatacatctaaagtttggaaaacgttgctcaggatgatccctaaggacgctttcaagtcctttcagcattttaggattctataattgcatatctttatgcagaattatgcattttttgatttagcaaataggtagatttaaatatataattaaaggtcaacctgttcataccttccagaaagactggggtgagatgaattccatatttttgtgtcatctaccaccacaaattttatttcaatttcatataaaggttaaaaattgagatgtccccatgtacactcaacgccatgtagtactgtgcctcctactacgaagtcagggttgcaaaaagccttcatgtaacattgctgtctatggtaacttgatgtcatgtctttttcatttctggttttcatgtctgttgtatctgacattctaaagaattcaaaatagattgttcttgaaggggatataaatagaagtgatgggccggcatggtggctcacgcctgtaatcccagcactctgggaggccgaggcagatggatcatgacgtcaggagttcaagaccagcctggacaagatggtgaaaccctgtctctactaaaaatacaaaaaattagctgggtgtgatggcgggcacctgtaatccaagctactagggaggctgaggcagagaattgcttgaacccgtgaggcagaggttgcagtgagctgagactgcatcactgcactgcaggctgggcgacagagtgagactccatctgaaaaaaaaaaaaaaatagaagcgataatgctgtacatctgttagccacttggatgctctctgccagattgcacaaaagttcatggtacgcctgctgtcaccagatttgggtattattttttaagaacccagaaattaaaacagataatatgatcctgttgatcaaacagtataatttttaaaaaggtactgtttgttaattttaagaacattccagtagaccgattggaggagaaatgtggtccccctgttaggcttagattttacataaaatttttaaagtgaaatttgattggagaagttgagttttttttccaaaatatgattttcttccattgagattgattggactctataggttcactgcaggagggtgggacattcttacctgttcgtaatacagaattctctgagagaaatatcccttcatctcagtgtctcagtggacattgttggtattcctgagtgttttgacattttggccatttccaaacatttctaggtctttgttattgacctgcctacatttcaattcttggcccttccctctgttttgaaatgactcattcttcacaagagcaaactgaaagctttactgttaagcaaaaaaagaaatcttgagccaaagtattataacttgctctgtaggaaatgaaaacagtgcattggccatcttttcaccctgttgttagagtatattaaattaaaataacacagcaagaaacattagtttccatgattcattttagatttatgttggtgtgtggatttggttggttgtttctttggttagtagaaggtgatgtattaaagtggaggtctggtatagctgatggaaatgagtttttttaaaaaggttatgaaacatctatctccctcttgagcagtagtccaggggagtgatcacatactgagatgaaaacaagagggtggtaatacagcaagtggtgtatgattcagtaactccaccggattgctttattggttaggtaatgaagcacgctagggaatttctatcaaacaggagtcaacatactgcccaataacatctgaaatgactgaactataagtttagggagcatgggatgaggtgtactgttaaatcgctcctatgctggaaagtgttccctaagttcttcccatcactacctggagaagttgatgcgggattactgggagaaggcttgtgacttttaggtcctctcagagctcttcactttgctccatgttgtgtgttgttttcttgttcgtgatttttttttttttttttttttacaatgaaggcattccaatcgggctaatacaaacatgaggcattctcaaactacaggaaattgctttccttaactacactctttgaaaaaaaatggggtttaattacctgctgcttttctattgctcagattcccttcaggatgcagggggagggatgggagagaagtttcctttgtgatttaatgtaattattcataatgactacatatggtcattttataagttcctaattattttaagtgattggtgcatggtcatttgcataggctgtttagcagaaaactcattcagtgacctacatataaatcatggaatagtttctaggcatgtaaagcgggtgagagaaaccaaacccttccccccatcacttatggttccaatgtatgcatcccagaatgtttaatgtaaatcataatagcagcttggatccagtattcttcatacaaatgtgtggttgatgtagggaaacatgtttaatgttttctttcagtagcagatggtacatggatttttatttgatgcaggcactgctttccaaggtaattgtcaagggcttttttccccctatgaaaaaaatggagggaaggcctctggatcaacccattcatttcacagatgagcaaactgagacctcaaatattgagtaattttccctaaatcaccagtttttaaacagagtgagggctaaaattcacatctcctgacagtcagcttaattctcttttcgtcatactgcacattttctcttgatagttgatgtgatatatgtcactttaaaaaaatgagtttccatttctgggtatattttatctactttcctcctcagaaagccaagttctgttgattcatagtaaggaccagatatttcatagtgctaattccaagctgggtataatttgtgacttctaggttacccacttgtgtccacaaaccacctaaattttttaattgtacacagtcaagtcaccttgatagaaggggccttgagagctcatctaattcagtgatttttccaacactggtttcagggctgctgatgtgctattgcatttcacccgagtccacaacaaaataagaagaaaaaaaatcagctctggggagttttgtcctcaagttaaattaattcccattttttttaagttacgtctttatcaaatgttgatgcttaaagagagacattgttggctgcgcacgttggctcacgtctgtaatcccagcactttgggaggccgaggtgggtgaatcacgaggtcacaagttcaagaccagcctggccaatgtggtgaaaccctgtctctactaaaaatacaaaaattagcctggcatggttgggggtgcctgtaatcccagctacttgggaggctgaggcaggagaatcgcttgaaaccagaaggcagaggttgcagttagccaatgttgcaccactgcactctagcctgggtgacagagtgaaactccatctaaaaataaaaaatgaaaaaaaaaaaaagatagtcatcgttgctttcttttattttcatgagaaaacaagaaatgacacatgtatgtcagctttccacaaaatcaccccctgccttccctttccttttatgttcttatgtttttattgtgtttacctgtcagtgaatccaaacattgagaaacattgggataagggaatgttattttctaggaaaccaaagttttaaaatatcatggttactgtattagtccattttcatgctgctgacaaagacatacctgagattgggcaatttacaaaagaaagaggtttattaggcttacatttccacgtggctggggaggcctcacagtcatggcggaaggtgaaaggtatgtctcacatggtggcggacaagagaagagagcttgtgcagggaaactcccattttttaaaccatcatatctgaagagacttattcactatgaagagaacagtgaaggaaagacccacccccgtaattcagtcaactctcactgggttcctcccatgacacttgggaattgtggcagttacaattcaagacgacatgtgagtgggtacacagccaaaccatatcagttactatagtcattttttggcaaaaccaagaaatagcaaacttgagcccgattccttaaaacagataaagcaccctaaccccccactgccaaatcaacactcttccactatatcattttccattttcaataaataactctttcatccactgtaaataacagaatagatgttgtctatgaattcactgcttaatatttcatttatctacttccttctacccttattcatacctatcctaaacacttttcaaaggaactttctctctgtctcttgttaaaaattttctcttgtaattcttaaatatgtacagatgttaccaattggtaagagattcttttttgatgaactttctctcctgggtacacatttatgatcctaaacgccccatgaagatgggcctacatctgccttccaacttcttctatgtccctcagtcataaatatctacattgtttctttgataaattttgggaatgatagaagacaataagttgcatgatgactgcttgtcttgttctttgttaaatgtacctatgtctccaccccctttcttccacatctcaaattggaaatcattgagtactaggagagagaggaaacagggcattccttagtgggaaaacataagatgccacgggcagtctaaatgtcaagatttggactgctggtctaaaaggtttccactctctgggttgctctagtgaagcaaataaatagagtaacacatcgatcctcccacaggtagaaggctctgctgttcgttgttttactactctgcagataggcagcagcagcagcagaatttgttagcaaggatcagtctgagtcgcctatgtttactaaggaatctgtccaaattggccgtgcctttgatggatattgttattcccccataacgctgtccttaggatcctggtaaatctcagaaatctctatacaaagttaccgtttcagagcaatgaatgtgggcaaaggtgaaaatcattatgaagcagagagtggagattattaacaggtggtcgaaagagagagcgagagaaagggggagagagatagagttgctttgttgcgcaataacatgaagataaaacagttaaacacatatatcctgtttcccccagtacaagcctaatgttgctgatttcaggttcctgtgacatcattcatttactgcacctattatattacaatgggggtaaaagaagcactttccattttcatgacagaagaaatgaaacagcaccagcattaacaatagcatactgggcactgtatctgttctccttggttctggaaaggtcctagagatttatgagtaaattggaccattccaactataggcattaaagttctggtgtttccaaaccacgttggctcttggggtccattatacctggttttatgatgtttaaaaatccaatatcatttggtaagaagtaacacaacattatgtctgcaatcatgagctctagaaccactcgacttgagttgctatcccatttctactaactggtagctagctgacttttggaaaggtacttaaactttctgtgtcagtattttcttgtctttgaaatggagatgatgatgatggtgatcacggtgatggtgatagcggtgatggtgatgatgggaatagggatgatgatgatgatgatggtgatgatgaagttgatagtgataaaacccaacacataggcatgttagaaagactataaatatatgccacacccttaaacagcatctagcacgcatttaataaataggtctcattgtgattagcagaacaaatgaaagcagggcgtttctagtctcttctctggtcgtgtccctaagagaaactggaggtgcctaagaatcactggggatactagtcccagagaagagttcctggatcctgttacatgcttcctgaatctgcatagattgtatctagaaacttgcatttttgataaactctgaaaaaggttaaattttgagaattgatggatttgggcaaacgtgaaagccattctgagacagaagaagtagaggctatcaccaggtggtcctgcttaatagatagggagagacagagagctgctatgttgtttaattcagaatggcagggagctgaaacattgcctaattctgaaccagacccctgatgcttaaataggaagcccagataacacccccaattctaactgcagccatgctaactaagataacagctgtctgtattcaaagacacatatatctgtgctttgttgactagtgcctttcgtttctctggccaaagcaaatgtgcttttttggctttaattttgtgcttttcactaattaagttgtttatatgaactaaaatatttatacacccaagataatgaaaataacccatgataaatggaacaaatggagtaaaagtaaagtagatttagtggcaccatagtttattgagcatctgtgattagattgtgttccctaggatgcttcggggagtgtaattcaatctgcagtttgaactgatgactcttcctttctgtagaggtttagagaaaaaaaatgaattcttgtttttaatatctcaagtttctcttcaaatggctacttgttacatcttggggtaggaggggagtcttttaggaaaaagaagaatgggtatattttgttgccatccaggagggagactgggcagaaaattaggctatatttggtagcttataatctaggatgtgtgaagatggggtacggtgactagctgatgcaggtgaatcccagaactggggctcagcttcgaagagttcttagctttgctcaggaaagaattcaaaagtgtgctgatggaggagagccagtttactaggggaaaccgtgcacagcaatatggctgctccatagacacagcagggccaccccacaggccgagtagcactcctggattgttggctagctgtatttctagctacttatcattatatgctattaggttggtgcaaaagtaatggcagtctttgtagttaaaaaaaggtaaaaactgcattgacttttgcattaacctaataaggcgtgagttattcgcaaactttctggaaaagagggagttcccagagccattcatgatggttaatattaggtgttaacttgattggattgaaggatgcctagagagctggtgaactattgtttctgggtatgtgtgtgaaggtgttgtcagaggagataaacacctgagggagcggcctgggagagaaagacccaccctcaatctgtgttggcaccatccaatcagctgccagtacagctcgtataaagcaggtggaagaaggtgggatgagctagtttgctgagtcttccacctttcgtctttctcctgtgctggatacttcttgcccttgaccatcagcctccaggttctttagcctttggaccgctggacttaacaccagtggtttgctagaggctcttgggactttagccacagactgaaggctgcgctgtcagcttccctgcttttaaggtttcgggactcggagtgagtcattactggcttccttgctcttcagtttgcagatggcttatagtgagacttcgtcttgtgatgatgtgagtcaattctccttaataaacttcctttcatatatattaaacacatatatcctattagttctgtccctctggagaaccctaatacaccatctaagataacttctgggcattgtcatggtgtcagtaaactgtcatggtgctggtaggattgtcttatgcagatgtattatcgttcctagtcctactggtttgggccaatttctttgcgacatccagttttgatcaacagggtattgaaaacaagtcttgctgttttcctgcctcataaccatgtctgtttgcccaagactgtcccagttttagcactcagcattgaaaacccagcaccctggaaacaccttagtcctgggccaaccagacgggctggtagtaccaaaagtcagggctacctatttttgtttttcatgcaataagttaaggaagtggtttcctactctaggatagtgcttctcactctttaacagtgataggcattgcctggggatcttgctaaatgcaaattttggttcaataagtctcgggtggggtcggagcatctgcatttctaataggcttccaggtgattcaaaagccgcccttccgtgcacgctacactttaagtaacaagcttctagagggcccggtaatcacctggccggatggttaaagagcaaattcaggataccaacattttttaattctttgcaattacttttttctctccctaaaatttttgccttttaaatcactggagtaggcccgtggacgttcagtttttcctaaaaagactccttttatcttttagataaagtacaaagtaagggtctctagaaagcagtagatgacaaagtagcttttgaaactaaaatctcatgtgagtgactgtataaatagcatacaaaatggaaggatttttcattttcttctggttgtttttctatgtagttggaagttaattcacttcaagtggaaatctggaaactagtttgctatccgtcttgcccctgtttgagtatctctcaagggtatctgacaacagtgtgggaaatcaataaatgtttgttcaataaatgaaaaagtgagaatcatttaattcaatgatacttaaacttgaacatgcacaaaaatcagacggaggacttgttaaaagtgcggattgccattcagtagatctggggattgacctattaagcatttctgatatgctcctaggtgatgttgatgtcttggaacacactgtgaatggcaagaatcaagattgaacatgcaaaaaaaaaaaaaaaaaagtaacgttacatatcatgtattttgccatgcaattaaaatgctgggaagtgtgatgatgattttgtcctttagaacatataaatgggatctacagttgagagagaaccatacaaggctcttggtaatggtcaggcttatgtatttaaggtgtaattgcatctatctttatactagttcctttcccttgggaactgctcagctgaagataaataagcaaaacgggcacatgtgtagcctaatagcaaatataaagattattgagccagtttatagtgactcaataaaattctgcttgtcatgggtaagcaaaagtcagggcccttgaaatttagggtgcagcaaaaggaagcccataattggggtggaggttggggagatggccaggagactcatgtgtccatcaggagacagctaattgggcaggaaaggtgtttctggaccaaactgagggtcacactgctatttctcgtggtctaataatgaggtgcagatgaactggggaggaagagagtttttatttctgtaaccagttacagggagaaggtctggaaaatattgccagaccgactcaaaattacaaagttttccaaagattatataccttctaagttgtatgtctacatgtaagtgtgcattcatctgaagacctaagtggttcatttattgtcatctgtacctaagatctgagtcctgaggaccttcatctggaccttcagtaaatttaatctaaatgggtctaggtgctggggtgattacccttatcttgtctcgtgctaatcatggaggttgggggagttcttttagaccccgcaataaacttgtttgtggaggcctggggagtttcttcagatcccagtaaaacttgtttaatcctaaacaagtcctgttaagaaatccttcagtatcttgtcaggatttaagccccaggaaaggcctgggcacaattctgggtgggctttggttgcatcccagcctttgtagatgggctctggctgcctcagcttttattatttaacttaaccactcagtcagtgccgaaacagtagttgtggaggcctgtgttagtgagacctgatttgccacacagggtcctgttgtgcttctctgggaatttcattgcttggatgttatttgacatttcccttttaacagttaatgttagaaagtccatgttatggcctggcgcagtggctcatgcctataattccagcactttgggaggccgaggtgggcacatcacctgaggtcaggagtttgagaccagcctgaccaatttggcaaaaccctgtctctacttaaaatacaaaagttactcgggcatggtggtgcacacctgtaatcccagatacttgggagggtgaggcaggagaatcgcttgaacctgggtggccgagattgcagtgagttgagattgtgctactgtactccagcctgggtggcagtgagactccgtctcaattaaaaacaaaaaaagtgcatgttatttgatggtttttatattcctttattcatttcggcaaaagccattcccccacgttgttgtaagaatctgattgttagatgatactcttgaagtaggctgacccaaaatatttttcggagacttggctatgaagaattttataaactaacttaagttgcctttcttttaaggagctgacatagtggaattgtgcaaagaagttattttagtttcccttagggttaaatatttattgaagagggaagatggcttcttccacaacaatttttattttctccttttctaatctgttctaaaagtcttttagctgccttgctactaggaaaagggacttactcatttccattgaactcaaaatgttactttgtgtgtgtgtttaatttccccatcacccactctgcagactcaaaacctctgagctagaccatgccttgattttttttttcttttaaatgccatgagttagacatttaaggacaccaaatgattgaaaatagtcgaaaatgttcacttgaccctcattgcctatgacattgctgttagctttctgcatgaaagtgcaaacttcaattttcaggaaggcccacatcccagaactggcattgtttccttagtcattggaagcagaaaactacagcagaagtgttgcctccagccgtacagagaagaacaatctgcaggcacaatctggaaacctttcccagtgaagggagaaagtgagagtggcgttctggccttggaaaaacaaacatttgttattactttcctagggactgaaatttttagctccccagtgcaatctgtgtataatctagatttccagatttcctaaatggaaaacagataaacaaaaatcagccttcttaaattatgtatggtggtaaaataaagtaactgagaaggaaacaggattcctaaaccgaatggactttagcaaaagaatctttcaccattaataatttctccctgaacaaatatgcagatattttaccagacagagaatagagactttgttttggcttatcttgcttaagagtaattctgagaatctattacttgtgagagaataagattcataaggaatgttcgttagagagttgtactgggagattcacaggctacatttctaattttttcctaaagaactccttttacaataaaaaaccatgctgtaagctgcagagtgttgctgaaatgtaagcttttaccattgttgtagatctggcatcttgtttagaacccatagtttcctaatatttgcacgttataacatatgaagctaaactgtatagtacataaaactcatacaattttttttttttcgagatggagtcttgcactgtcaccctggctagagtgcaatgacatgatctcagctcgctgcaacctctgcctcctgggttcaagtgattctccttgcctcaggcatccaagtagctgggattacaggtgcccgccaccatgcccagctaacttgtttgtatttttagtagagatggggtttcactttgttggccaggctggactcaaactcctgacctcttgatccgcccacctcagcctcccaaagtcctgggattacaggcatgagccacccagccctgccaatacatacaaattttaactccagggtaaattgataagacttcttccttcatggaagttaaattctaataggatccctaatgccccatctagccctgcagtatttcaggtcaacaataactctttgctgactgaagatttgactggatggtacacgccctccaatggaactaacaggctcaacagctctaggtgcataaataatcttcatcctacaaataaagaattctaaattggactctaaatattgtatgtggctactgtggaagctaggaagattgattggattaatatcaagtttcacaatgtgttctttcattaggatgtcagtaatgagaatgaactattcattagaacagccaactttctaaagaataagagtgctgacctcacacatgactggggcagaacagggtactgtttacttcatgagagccctagaatgggacgcagtggattgggggccgttccctactctattgccaagtatgtgcatttgccactctgacttcttataggtaaagtattggcagttatgtcctccatagtcaatttcattcttaaaaaggccatgtgtcccaaacattaactgaaaaacaaaaagcgagattcaaagacttctcatatgctgttggtcggagtgtaaattagttcattgtgaaaagcactgtgaaaggcaattcatcaaagatctgaaaactgaataccatttgacctaccagtcccattactgggtttatatgcagaggaatataaattattctaccataaagacccatgcacgtgaatgttcactgcagcattactcacaatagcaaagatatggaatcaacctaaaggcccagcaataacagattggctaaagaaaatgtggtacatctacaccatggaatactatgcagccataaaaaatgagatcctgtcttttgcaggaacatggatggagcttgaggccattttccttagcaaactatgacaggaacaaaaaaacaaatattgcatgttctcacttacaagtgggaattcagtgatttgaacacatggacacacagaggggaacagcagactttggggtctcctggaggatagagggtaggaggagggagaagagcagaaaaaaataacttgggtacttggcttagtacctgggtggtgaaataatctgtaccatccccataacatgagtttacctatgtaatgaacctgtacatgtacctctgagcctaaaataaaagttaaaaaaattctcacttcagttatcacattgaaaggaatacagatcatcagacaatgaagagcaaatcaaattattcctggtatctcttcgaggatgtttacaaggagggaagtctgttaatgaatgctgaaaacatgtgaaattatccttaccatcttgtccattctgcatgcctcacaatgtaccctcctttcttcaaggtttttccctccactgtaaagtctgaagtgtaacacccaagccatgtggagattttcacatcttcgctgccctgttgtcctcagcatctatctccgcctttctccttacagtcacacttggctctttccaacacgaatcactagcctttactttccctgttgtatcttctttactcattgctttagttctaaaccatagaattccaaaagccaagctggaaaaggaggagttaccttttgtgaggtgagaaggggaaaaactgtgggtattcatactcaaaatatttgctagttgcagctctataagaagtcatccagcagcttggagaagtatatggttcacaaagatgattcatccaagaaccagtttgaatatttagatgatttagagtggaattagttagaatagaaatgagtatagaattgccacaggtcacaatataagagaaaaattagcaaattaattaattggatgttgttctatagccagtatttgttttagagatttttatgaagtacttttccttcctgaaagtcattataaagctttgtagtaacctgataatgttgaatatttactttaatgtcatccaaaaaactatagagttttgaaagatggaatgagaaactggtctgtaataaggaaaaaccagaaagactgtaatacatttgcatctttttcaaattcatatgctaactagagctaacaaatgttaaataatttcagaaagtatctttgctgggcctattctgaccagtaaataaaagcatttgaatgagttcaccatcttacatggatagtctgtggagaagaaatggattttaaagagcctgaactagttcccagcaaatttgatcacatcattggttttttaaaacatgtcttttacctacacgcggtaacagatttgtattatatgcgctaaaatgataatattgatattaatgaggtgatattgtcttacatgtattaccaggggagcatctttctgttttttctccctttctttttctattttttctttgtttctttttctctttccttttcatttatatatataaataaatatataaatatatatatatatatatatttttttttttttttgagagaaagtcttgctctgttacccaggctggagtgcaatagcatgatctcagctcactgcaaactccacctcctgggttcaagtgattctcctgcctcagcctcctaagtagctgagattgcaggcacgtctcaccacgtccagctgatttttgtatttttagcagagatggggtttcagcatgattgccaggctggtcttgaactcctgacctcaagtagtatgcctgcttcagcctcccaaagtgctgggattacaggtgtaagccaccgtgcccagcctctttttttccttttaataaaacactggttacaatgtgagaaacagattggagattggacagggagaccagttaggagtctgttccagtagttcaagtgacagctgatgccctcttaaactaaggtattgagggagatgatgggaactaaacagcagattcaagagttctagggcatacaatgaagagaacttggcaataaattgataatgggaattttgagacaaggatgagtgagtccaagttgatttctgcatttagggttggttgactgaatggtggtgccattcacctggatgggaaatgctggaggaatgttggagtagcacacagggctggggtcctgagttctgcactcactaatgggactttgcttgtcctatgatattaagatgcatactatggcggagtgtggtggctcacacctgtaatcccagcactttgggagcctgaggcaggcagatcacaaggtcacgagattgagaccagcctggcgagcatggtgaaagcccatctccactaaaaataaaaaatttggctgggcatggtggcagacgcctgtaatcggagctactcgggaggctaaggcagaagaatcacttgaatccaggagatggaggttgtagtgagctaagattgtgtcactgtactccagcctggtgacagagcgagactccatctcaaaaaaagatgcttattatatatatagttctattgaatatgtatgttagtatatatatctagttctgttgaatatatattattgtgtgtgtgtgtgtgtgtatatatatatagggtataatatgcatatgtaatatatgcattatatataatatgcgtattgtaccctgtatatatatatgcatagaactatatataatatgcaaattataccttgtgtatatgtatatatactatcctatacaatagaactatatatatataatcatactcaatagaactagatatatataggatgtagcaatatgcatagaactatatataatatgcatattataccttatatatgtgtgtgtgtgtgtgtgtatatatatatatatatatatagttctattgaagtatgcactagcttccagcatgtagcctttatattctactgatgccccatcactttggaattacctcttatctttttctctcctgcctttctaatatcaccccaccactgattcccatctgattatgcctacttcactgaagcacccttgtcactcccttcaatgcctaaagtattgctttcttaagtgctatggaagcagagttccttttcttgcagtgaataaactacatcccaaggatctcaccccttgcttccccagtgaatagctctcagatggaaaataaaacagcaccattactctctgagattaagagggacaggtttgcatactcaacaaacattgtctgatggggaataactgccaaatttatcatctcagggtgttggtagttgttattttaatgtaaattttgaatagataatagattaatatgaatcttattttaccaggcagaaaaatggtatacagtgaagagtaatgcttcctccaacctctgcccccaggtaatactgttcttttctccacagacaaatacctggttatctctgggtctgggtattaactgtatctgtgtcttctcccagtcataacatacaatatctctaattcatagaaaatcactacctcttaccaagggaatacttcctgtaacacctttagcagggaacaatatcggataatcccaaagcaagatgttaacgcaaactaaatatgtcctgagaaggactctgtacttctatatttgagtccttgtggatgaactgtaacctagcttaatagacaagactgaaaacctgacttaggagtatgcacctgtaacaatagttgagtcttggccaatcccagccgccatacttcaaccacccatagactgctaagtgttcaaaaaaggcaaacaccaacctgtcaccagttcagctgtttgtgtacctcactgctgatttctgtaagtcatttccctttttctgtctatgaattttctttcaccaccttggctacgctggagtctctgaatctcatgtgattctgggggctgccttctgaatcgttcattgctcaattaaacttctttaaatttaatttggctgaagtttttctttaaccagagggaagaaataaactaatgtagattgcctctaagtgccagccactgtgccagacactttctaaaggtgcatttttaaagaattattttttaaaatttttgtggatatacacatagatgtattgatttatggggtacctgagatacaaaaatattatcttcctcatctacattgaagagctgtcattcaccccaggaggcagtgtggaataagtttctgtgcacctgagactatatcctattgtatatgaagccttcaaccaaaagtgccataaccttggtacagaattgctaccccatccgaagtccataggaacacagcatagaacaaactgaagtctgagaagttcaggtgagatacgtagagctgcagaagaggagtttttcattgtctctgaattggtctttctcagcgacagagttatttatgagatggggcaatcatagaaagcagtggcttttaaaaaacacttcagctgccaaaaatcttattccaattctctggaagagtgctgtcgtaccaagtgtaattcaccagtccggtgcctttctggaagttatgaaattggagagagttgcttttgtacaaatgaataaacaccaccaagatgagcctacccgcttgtcctgagttgagattgatatgatcagacatctagagcttgttctcctgggtgtctctctgaaaaaattctcttctctctcaccttttttttttttttctgttaataagtagacaatgctctggtctgatggggtctcaggaaggaaactggtatctatcttttcttgtcaacatttaccaacaaatatgcctcttatggacagggatagggattacggatcactctcattgtcttatgtgtgcaacttggagtggattgttagctatccagaaaatgtccatccctctttttcttggagaaattcactttttaccacattttgtgattcaaattggtctgtcactgaaattattctgaaaggttaaatgagacccatgagggccgtacaggaggcttccgtgcattttttcctctccttgtccaagtggtgaagaggtaggcacataaactaagcgtggacaatggtactttttcctgggagaaggatgactaaaaagatggcgacacaaaggtatctaattttccgttcatggcaccgttcatgagtcttgattctgtgaatgtccccatatgcccctccaaaaacctctttttttttccttaagttagccagttataggtttgtattatgagtttcatagtgctataaagagctataaagaacttcctggagactgggtattttataaaggaaagaggtttaattgacgcagttccacatggctgggaagtcctctggaaacgtacaatcacggtggaaggcaaaagggaagcaaataccttcttcacagggcagcaagagaacggagcaagagcagagagaactgcgtcataaaaccatcagatctcgccagaagtcactcactatcaggagaacagtgtgccgggaaaggtcgccatgatccaatcacaagcctccctcaacatgtggggattacggttcaagagctgatttgggtggagacggagccaaatcatatcaaggttcggttgcttccaaccatacacgtaacagatatttcactaaatgctattccagaacggatttacacaatttttggaaatagttacagaacacacacagaaaaactgatgatgataagataccccgaaaaacacacctgggtatttctttctgggatgttgtggctgagataccttgatagaaaagccgattttgctgagtaacttctaaggcctccaattctgaaggaagaattaagtgatatgagagtttggaaaataattgaagagacctgcctttgcaggaaataatataggcaggaaaaatcaagaatgccacaaaattgagtaaaagagaacaaaagaagagaaatagaattacctctcaactttgtaaaatagaattgaacccagtaatactggataagatttaaaaatattatggggtaggatcacttctattaaatgtgattagcttttagctagataacattgaatattttaatgtttcattggctattatacaatatatttttttcctctatgaatattgtaaaattcctgtttgatttaggagtcagggatgtttaagtgattatgtagctagtcctcagaccacagttaaaaaggtacttttgttttgttttctggcgttgggaagattagcaacctgggtgctagcatggaaaaggcacaggaggccagttacggtgcctcaggtctgtaatcctagcactttgggaggctaaggcgggtagatcatctgaagtcaggagtttaagactagcctggccaatatggtgaaatcccatctcttcaaaaatacagaaattagctgggcgtggtagtgcacgcctgtaatcccaactactggggaggctgaggcaggagaatcgcttgaacctgggaggcagaggttacagtgagccgagattgtgccattgcactcgagcctgggcaacacgagtgaaactccatctcaaaatataaataaataaaatacaaaatataaggcacagaaaaaaatactgaaataagttgcagactggaatttcttacagatgttgtttctcctcagcatgaacagaggtggccatgccatttctccagataaatagtgcagtacaagagtgttggttggtttcatgtatcaccatataaagttgtattatcagactccatatgatgaagaagccttcacgagaaactcactaccaaagcaaaatcgttttaaattaatgaatgattttcaagtaaaggccccataggattttttatttgtcctcctgttagaatgaatatctgtgaatattaagctcctcacatttcctgttttgttaagaaatttgttcaaaatgaaagtatctccctttagaccaagctaggacggtctactaacagaaccttagaaaggaaacacaatgcaaagtgccaattagcactgcaaagttttggttcagtttcttattttttattttttttgagacggagtctgggtcttgtcacccaggctggagtgcagtggcccgatctcggctcattgcaacctccacctctagggttcaagtgattctcttgccatagcctactgagtagctgggattacaggcacatgacaccacgcccagctaattttttttgtatttttattagagacagggtttcagcgtgttggccagactggtctcaaactcctgacctcaattgatccacccgcctcagcctaccacagtgctgggattacaggcgtgagctaccacgcctggccttggttcagtttttaatgcctaaatgtggtctaaatcttttaggacaagtgtggcctcatgcaacatggattgttggaggcctcatttgtgctcataagcggcattttccttgtggacctcctgttttactccattaggttttgcatacagcagtaccatagaagatggagcacttagaaatggtgggaagcccctgagtcctttgtccatcatgtcagagtgacgatgtttctagaggtcattgctgtctttctttggagactgggagaatagggaagtaaaggaagatgtttaaattccctacttctctcttttttgttagatttttaaataaaactttatttcacaaaagacctattgtcatggcaaccagtcaaacaatgctgatgtatatgaagaaaaccatgaatatattttcactcccattaaaaaaaaaaagtgcaacctaagttttcaggcctcacctttgtatggttaaatatcaggccacaatgacttcctataacaaaattgtgattatagcaaggatgattggctaattactgaaatttacacttctccggttccccagatagtattccagttctttctggcagtcctcaaaacagccatattccatgaaacaaccctcttcgtttctagcctccagttgaccacattcatgtaactgccttcagaagctgctgcttgttgcaattcccatcttgagaatgctcgtatgggttcccaggtgtcacctctgaatgttctcatggctctagtttggggaccccagctccttcttaggttttcttcagagacagggccaatggctctttccccagccctatgctatgatctgtcacctggtccctaaagtagctttgcttgtgctgaatctcactaagtgtctctttcatcttctgcatccaaacctctctctccacaggtggctcaaaatcaatctgaagaactgagtagggggtggatgcaattccttttcattttgaatttctttatcacctttccaagtcccatactctctcaccctatcaaaatcttctccctctgtccctagttataaaatcaaacctcctgggcatgccaatggcagcaggcacctgcagagatgcggaggattcctgaagaatgagtgaagggaggaggcgctgttgatacccccaacccctctggcttccatctgagctcagccagccccttgttaggtaatgaagggagataatggtccagactggttacatttccttcctcaagttacccagcaaactattaaccagtccttgctactaacactctcatcatggcactggcaatatctgaggaccggttcagtgatctgcacaaagggaaattagattcaaacataacaacttgtcctggagtgaaaagcagatgtataatttctctcatttgtccctactttatttaatagcccacatagggagcttatttaaaactcctagaacaacaacacaccaaacaagccaatattctgagatctcattgcatgatcaacatgatgataataactgttttcttctttcatgtaataacacagagagaaaattgtggtgggggggagggaggaggtctaagagagtcagaaatgtccttttctgatcttcaaactgaaagcaagaaagttgattaagacatagctcctgatcatgtcctaagtgtttccatttctttctgacattgttttccatccattcttacggtaaataatctctgtgtgtcaagcctgacattgggtggtagaagcaggtgggtgaacaaggtagatgtggcttctagcttcatggggcttagagtctagtgggagacaggcattgatcaaattaataatgacaatccttagtatgtgctgtgaagggaagttacactgatgagcatgatagatgcgaatcacagagattctcaagtaaatggcagttaaggacagagctgaatgacaggtaggggacaaagaggctaagggggaagggctcctccaagcacagggagcagcatgtggaaggtcttggaaacctgaggaagtgaagtgaaaagtccttcagtctggaaccctgggggagaggtggggctagagttgaggttggatagaagcagcacatcaaggggtttgggtttatgtcctgtgagtgtttctggaaaggggtcctgatccagacgccaagagagggttcttggaccttgcacagaaaagaatttggggcgagtccatagagtaaaatgaaagcaagttttttaagaaaatacaggaataaaagaatggctgttctacaggcagagcagtggtatgggccgcccagctgctcatccttatcattacttcttgattatatgctaaacaagggatggattattcatagtttttcccggaaagcggtaggcaatgactagaactgagggtttctccccatttccgaccatatagcgtaacttccgggtgttgctacagcatttgtaaactgtcatggcgctggtgagagtgctgttgagcatgcaagtgctttataattagcatatagtgaagagtgaggatgaccagagatcactctcattgccatcttggttttggtgggttttggccgacttctttgccacttgctattttattttctaggtctttgtgccccgtattgtgtgctgaactcctgtctcatcctgtgactaagattgcctaaccttctgggaatgcagcccagtagatctcagccttactttacctaaccccttttcaagatggagtcactctggttcaaacacctctgacattcgcagtggaatccattaaaagatgttaaggagatatgattatatttctaaattgtcactccagcatcccctacgccagacattatgccagtctctatccatacagtatctcatttaatcctcccgtcattaatctcattttaccaatgagtaaacttgaagcaaatgagtgactttctcaaggctacctacttacgccttaccagggccaggattcaaacctagacttgttcagcgacagaacacacacttaaccattacccactcttctctctggtccccagcaaaaagtctatagtttgcagccaaacctcattctctaattccaactacctaatagtttgctcttaatagttactttaagaggaaaagcttaattctcacaacatttgtcaacactcagtctgtttgaatgggtataatttaaaaaataatttacttccactgaaggaaagaaaggactgtcttgagaagtaagaaacttgaagatctttaagagtattaatattaaggttggcaaatcctttgagaagagtttctttctgcctattgtaccatttaaaaataatcggccaggagcaatggctcatgcgtgtcccagcacttttggaggctgaggcaggaggattgcttgagctgaggagttcgagaccagcctgtgcaacatgaggagaccccgtctctacaaaatttttatttttaattaggtaggtgtggtgatgctcacttgtaatcccagctcctttggagactgaggtgaggattgcttcagtactggagttcaagaccgtagtaagctatgatcacactattgcactcgcacttgagccacagggtaagaccttgttgcaatcaatcattcagtcaacaatcattgtgtcatgtctgcctgcctgttgaaaaagccttttagatgaaagtcaatcttcggttttgttgttgccagactggccccttcatgtaattttttttttttttttttaaagaaacagggtcttgttggccgggtgtggtggcttatgcctgtaatctcagtactttgggaagccaaggcggacagatcacaggatcaggagatgaagaccatcctggctaacacagtgaaaccccgtctctactaaaaatacaaaaattagccaggcgtggtggcgggcacctgtagtcccagctgcttgggaggctgaggcaggagaatggcgtgaacccgggaggtggagcttgcagtgagctgagactgcaccactgcactccagcctgggtgacagagcaagactgtctcaaaaaaaaaaaaaaaaggaagaaaagaaacagggtgttgttctgttacccaggttggactgcagtgatgcaatcatatctcactgcagtctcaaactcctgggctcaaacagtcctcccacttcaccctcccaagtagttgggactaaaggtaaataccaccatgcctagctgttttttttgtattttttggagagatggggtcttaactgagttgcccagggtggtctcatactcctgtgctcaagcgatcccactgcctctgcctcccaaagtgctgagatggcaggtgcgagtcaccatgctcagcctctttgacataatttttgcaaatcaatgaattggacttgacatctaggtgactgtggatacagaactgatgtattaacctttgacatggctgcaacctgctgagtaaaggctgatcccttgactggacctgttatacatcactgtccacttgattaggtgcaaggaactttgttgcagagattttaaagtggaatcagacacccaggtaacatacttctgaccaccttaatgtgtcatagcttcaaacacatttaaccaaagcccctctcccatgtacgaggaccctgcttacctgttagctgcgtgtgtcacccttctttagtgtctcatggtagaaataattcagttttaaaattaacttttagctggacgcagtggctcatgcctgtaatcccaacgctttgtgaggcagaggcaggcagattggttgaggtcaagagttcgagaccagcctggccagcatggtgaaaccctttctttgcttaaaaaaaaaaaaaaaaaaaaaaatttaactggatttggtggcgcatgcgtgtaattgcagctactcgggaggctgaggcaagagaatcacttgaacccaggaggaggttgcagtgagctgagattgcaccactgcactccagcctgggcgacagagccaaactctgtctcaaagaaaaaaaaaacaaacaaaaaaaactaccaacagtctacatgaaggttgtgtgtgttaagtacatctgttaaacttctaagtttctgacaaaaaccttattaactataactcaagaattcatgaagtcccctgtgaatgtgactcatatcagacaggagatcccaagcccttcatgaaggcttgcctcataccctgttcctgggccattgcccaaaaatctactgtgtctctctgttgggcttcagaatgagatgatctggttttaaacgcaggcctgccatcctcaagctaaatgagcatgggttagtggctaaactttttgtgtctgctctcctatatctcacatgggcataaaactatcttagatgtcatgatgtaattgcattattgtttcagattttccacccctccctctatggaagcccttttctaggttcctctggtagagtaccaggcatatggcttcctgccacagggatcctgctgttggtcctgtgacagtttggccaacgaaatgttagcagacatgatacaagcagaggctttagaagtaggtgcttgtgtagctggattcacctgtgtgtgcgtctttcattactatgagaatcatggtttctaaatgggtgtgacatacggagctcacctcacccatcccacaagtgggacttaaaccaagtttagaagaaatgaacttcatctgacgtacagatccatgagtggccaaaaagaaaaaaaaaatattattgaatgccagtgagagttttatgagtgagtaaatgccagtgaggtttgttatgtagttactaaagtggcaataatacaagctgttgtaagatttaaactctagttcccttttttcttctaaagttgctatggcactctcatttaacctctagtagggcatgtatcactcagcacctgtgatgaatagctgctattattcatttttccccccttcttctggtaaagccccttagtgtttctctagagaagtcctctcttccaccctcagtctgtgtcatcagatagaaaaagccccaagcttcacaagggggagtgtgatcgaggcctggccactgatgccatttcatcctcctggcctccctgactggtccgtgcctgggcatatcgcccaactcagtccaatgagattaaatctcaggaatttacatggaattctttggaaagagactcgatttcctctgggcatgctgaactgatagaatgaagtcgaaattttggtagccacctctccatgggttgaaaggcacctgtctgagaatcaaacttgacacagaggaaaataaaggtaagtaacagagatggactatcaacggcattgtataagcgacttgaatgagttctgtctgaatccaaacaccacagacttccggtttcaggatccaacaatttccatgtgggctatggcagtttgtatcatatatttgacccctgtgagccttgtacactggagtgtcctaacattctgtttatttccgtatagaaatcgtcttcattcctgtggttggcaatcctgcatcatttaactttgtgtctcccagtggaaatggcatagtcccttgtacatagcaggtgctcacttaggtttgaattattgcttagatgaataaataatattggtctacagtgaacacacacacacatcctttaacatggctgtagagtttaagttgcaaaaggtcatcttcagaaaccaaaaggtaggccgggcatggtggctgaggccagtacttagggaggcccaggcgggcggatcacctgaggtcgggagtttgagaccagcctgaccagcatggagaaaacccatctctactaaaaatacaaaattagccgggcctgttggcgtgtatgcctgtaatcccagctactcgggaggctgaggcaggagaattgcttgaacctgggaagcggaggttgcagtgagccaggatcaaggcattgcattccagcctgggcaacaagagtgaaactctgactcaaaaaaaaaaaaaaaaaaaaaaaaaataacaacaccaaaaggtatatagtataacaggtattaaaatctatttcaaagaaaggaacttgttgattacgacactggtaatttacagaagagcaagcatttgaatccagccctctgattccagtgtaacctacaatgtaagtgctttcctcaagcataccttacagagctctgcacatcagggagactgttcctgcagaggtgatgtcatctggtattttcactcatcctctggctgtgtccccacccaaatcacatcttgaattgtagttcccataatccccatatgtcatgggaggcacccaataggaagtaaaattgaatcgtggggcttgatttttcctttccttttctcataatagtgagtaagtctcatgaaatctgatggttttataaaggacacactgtctcttgcctgccgccatataagacatacctttgcttctccttcaccttccatcgtgattgtgaggcctccccagccatgtgcaactgtgagtcgattaaaccttttcttctttataaattgtccagtctcaggtatttcttcatagcattatgaaaatagactaatacgtcctcttaatcatcaaataatcttttgattccctaatggatagataggattgttcaggtaactgtgataggcccaacacagtggctcctataatcccagcattttgggaggctggggaggaaaaatcagttgaggccaggagttcgacaccagcatgggaaagatagaaaaaccgtctctacagaaaaagtttttaaaaagtaactgggtatggtggcgtgcacctatagtctcagctacttgggatggtgaggcaggaagattttttgagcccgggagttagaggctgctgcaagccatgatcacactactacagtccagcctgagtgacagagcaagaccctgtctccaaaaaaaaaacaagcaaaacaaacaaacaaaaaccgaaaactgcagtgcattctcattcttagaagattttttaagagcctctataggcctcaaatcgatgctaagtcagagacttattactgcaaaaggcctgtgaatgagcacagataaatggaccattggtacttccaaagaagccatgtagaagttaattatttttgacccatagtgttgctgtttttcatcctttgtcatccttagcagtttggaccatacatttcatgcacaatggttgaatgataattaaagctaccagttattgaatttgtattatgtgttatatacagttacttgtaagggagtcttagggttattatcacttaattcttaaccctacaaaacagattcctatatatttccagtgtgagaaacacatctcagaaatgttaaagtatcaagccactacaccattaaaaaacaatagtgatgagattcagtgccaggtttatctgcccatgttcatgatctctttgctggaaggcactcctggatttggctagaagtccagtcatggcctctacccttgtagctgttttaaatatggtgtctctttacatctaaccagggctatcacctgggtctgtggtgctttcctctcttccctattactaagttttgctacctgacatgttttgtccccaaattggaaaactagtctagtctttgatactgttttattttaaaaaatttcattgaggtgtattccacataactgatatcaattatttttaagtgaacaattcagtggcacatagtgcattaatgttgtgcaactaccacctttatctagttccaaaacattttcattatcccaaaaagaaatcccatgcctattaatcagatgcttttcatttctctctccccccaaccgctggtaaccactggtcggtctgtcacaatggatgtgtccgtttatgatatcttacataaatcgtacaacacgtggcctttttcatctgacttctttcagcataatgtttgcaagattaattcacatgatagcctgtatcagtgcttcatcaatttttatggctgaataatattccactgtagaaatgaaccaattttttcattgatagacatttgggttgtttccattttctagctgttgtgaatgatgctgttatgaacatgaaggtgcaggcacttgtctgttttcaatttttgtgggtatatacctaggcatgaaattgctaggtcatatggtttaaccctttgaggaaactctgtttttcacagctctagtttctgatgtgattgcctctactgtttggggatggatgatacttcgctgacataccttctacatgaccaaatagggagcatggttgtatagacttgacaagtgatcatcatactgagactactgccagtgaaatggttgcgtgtgatttttctgcagctactgggggagacagactgagaaaggatacagggaagcaaaacgggagctcgtgtgccaagtcgaggcattgtaagaggggagaatgatggatggttggatgacagtcagtttgaaatgctggtatggcagatttcccttgagtatcaatgctcagtagtcccactttctgccttttccattctatcaccattattctttgttggacatgcacattcttcaatgcctgttgactctcagccattctgtggtctgttactgtcacttgcaagaatttggctgtcaggggagatgccagcaagtcttttaaaagccactgcaaactttcattgctaacttgtaacttggaggaactttcagagaaagggttataaataaaacacatgcatcaatctgagtttcacaacaggaatgcaattccacttcgtggctagagataaaacatgtcttgccgtgcacagtgagctcttcgccgtgcttgcattttatttcccatcacaatctaagttatggcagatgaagctgctcataaggtatgaggttagacaaccccatgctaattcacttttacacgctatggtgtgtttttaaagatccaagctctgctttcttcagcaactcaggcttgaaggaagggagaggggtggaaaagaacccagaagaacctatgggacaagcgcgagtatggtctgactctccaaccaggttaagccttttgagagcaatagctgaatcttagatctctttgtgccttaaaatgcctggaacagtgattcacataaagggcatgcattaatattaacaagtgcgtgctgctgcagcagaggatagttctgataaccattagagttcatggacaaaaaacgatgatccctaacagcttctcaacgtgtagatactttgcttagtactgtatgtgcattattctgatgtcatgtttgttattggcatgtgtgttgaatacaattatttccattttacagatgggagactgagcatcagagggtcatagccattttatgaagcctgtatttgatagaagccaggaccatctcagccccaaagtgattagggagcctgtgttccttcttaagcattaagcattctacttcactgacctcttggcccatctgaaattgttttgttttcttttttttttttcttttttttccccagaaagagtcttgctctgtcaccgtggctggagtgcaatggcatgatcttgactcactgcaacctccacctcttggattcaagtgattctcctgcctcagcctcccaagtagctagtattatatatgtgcgccaccacacctggctaatttttgtatttttaatagagatggggttttgccatgttggccacgctagtctcaaactactggtctcaggtcatctgtatgcctcagtctcccaaagtgctggtattacaggagggagccactgtgtctggccaccacatgaaattcttataagggagtatattatcttcttccttccttgaatattccaccagttttcctcccttgattttgaatctccctattcttgatttcttagggtcagtggaaatcattcttcttccctttttcattcatttgttcattcattcattcaatatttaccaccaattgaaattttgaatgttaaatatcagccactgttctagttgttgcagataggaaaactaataataggagattcctacctctggggacctagccaggtaatcagagaaatagagggctctgtgctgtgggctggggttgaggggattacagattgctgcaaaaaggagcatgctggagttacacgtaagaaatcagtgtaagaaacggtgtcctggaagaggtggcatctggtccaaatcttgaaggatgggtatgagctggccccatgaatgaaagtgtggagaaagtgtagagttctccattatctggatttccatatctttgtctacaccttgtattttgtagtaatggaatggtgaagaggagtttccagaatgtaaatagttatttggctaggcgctgttgctggcgcctgtaatcccagcactttgggaggccagggcgggtggatcacctgaggtcaggagttcgagaccagtctggccaacatggcgaaactccatctccactaaaaatacaaaaattagccagatgtggtggttggtacctgtaatcccggctactcatggaggctgcggtaggagagtcacttgaaccagagaggcacaggttgcattgagctgagatcatgctacagcatgctccaatctgggcaacagagcgagattccatgtcaaagactgtaaacagttatcttactgtcaaggcaactcaagatgttctattgctttaaatagaaaatggtagtggtgttttgtagtaaattctatatttcattttttaaaaattaacatgttgagtatatctcctatttttcttaataataatcataataaatactaatacaagtctgtaagttaaaggtgtgctgttttgtcaacagattactctgaagagaaaatccattccttatcaaaagaggttcttggattcatcactcactaccttgaaataataatgtttttcttgtatatactctctgttttacttttctttgaaaaagtccaaaagctttctttaaaaacttttctggaagaaaacatttaaaaggaattaaatatatttttaaatttgtaataacatgtcaaagataatacatgtggattggaaagaaacactattaacatttcaaaagtgaaataattgaaagtggtattgttgggttcctgccatcttccctagaggcaaccattggtacatgattaagtgcatccttctacactgaggatttcttttttctttctttcttggtttttttttttttttttttttttttttttttgagacggcgtctggctctgtcacccaggctggaatgcagtggcatgatctttgctcactgcaacccctgtcaccctggttcaaacaattctcctgcctcagcctcccaagtagctaggattaacaacctcactcagcacccttggcgttgctggtcagatgatcctttcttgtgggggggctgacgtgttttgggaggctgcttagcaattaacctcactgccctctagctactagataccaatgccacaccccttccctactctagatgccaaaaatgtctgtagatattgcccatgttcccctggggacaaaaatggctggtgttgagaatcagtcttctagatatttttaaatacacacttaaaattcacgaattaacggaaaagccagagattattcagcaaggcagggatgatttgaaaagggaaaggaaaaataacgacaggaaaagggagttgtgtgtttagaacaaacaagctgagaacacaaaatgaatctcactttttgaacagtcttttgatattgaaggtccaggtacctacgcacgtgtgaagcatttttgagttccattttctcttccttttagaaactgcaacatcctctccctgggagtgggtatttattcaccgcttcactgcagaaagcaggagtcttggataggtaacacaaggaaagaacctagtagcagatgaagaggaaagggagggaggcagggcagtcgatgccagggacacgtgtaacggggtcctgaagacacgcagctaatgaaaggtaagggtggagacagaggcagcgatcctgcacaggaacttgcatcttccatccggaaggaggaatgaatatccttggggagccttctgatgtaggtggcagcaagactttaggaatcgtgtgactttaaattcaaatcctggttgtaccgcagggtgctcatcctttaacgatacgagtttccatgtctgcaaaaatgttgaaccttctttacattttgggtaggccgaccacatcgtggtgatgtgcagaggtggtccacgttcattgcccaggtcccccacgttcattgcccaggtctcccgctagctgtttatttcatcttggtcatgccgtctcacttctccctaccccagttttctcatctggagaagacaggactcatcgtcgccacgtaggttgtatgtattgagtcagtcgacgcatgtaagagcttagaacagactgagtgtggtgccttgtacctgtaatcccagcactttggggaggccgaagcgagaaaatcgtttgagtccaggagttcaagaccagcctaggcaacatggggagacccccttcttatttacagaaaaagggaggggtgcttagaacactgcctggtacatagtaaatactccagagttgctcgctgggatcattagcactcaagtaattcccatgggttgttaagaggcttagagatgagaaaataacctagaacagtgcctggtatacaataagcgttccataagtggcagtgtgggcacagtcttccgggcatacgtgcttgcgggcatgcgtgctctcacgtgctctattcctcctctctttggtccctctccctcttgacattttcctttcttttttttaaaaaccttcctttttttctttgtttgctaccagcctaagagctcaggagagaggactaaccctaagaccaggtgatttatttttctcacgctcatttctctttaataattatcatattgactctgaatttattatactacaagaatgactttatgtgaaatctcatgaatttaaacattaatgtaagataaattaattttaaattgaaatcctcaaacgcagttggatgtgtttccgtatgatgaataagaaattttccgaataaaatctgaatctctgatgttccattttttgtgcaaatggaagaaataggtgaggatatttgacaaggttaaaatatgattgcactgcaatagataggccatgctgtaaactaactttttagtctggggagaaagcagtttgggggcaggctttggtggataaaaagtgaagatttctttgcacatacttaccgagtctcttagtgtcctttaatctaacaccagtgaatataagatataccatcctaaagaggacactattttttacatttttaaaaataaatccattgtattagaggtgtgtttttttttttcttcaactactttaatctcattttctcctaaagttcttctcttcaatatgatctgcaaagggttgaaagtgctgtcctccaaaccaggcgtaagaaagtggttacagataaagcaagtaaatccattaaagaagaaatgggaagatgtgttgtgtgccttatctgacccagcattatcgctggaggggaagtgcttatagggaaggaagagaagtttggtcaattgatgcagtctcagtatgatgacagctggtgacttcctgagggttattcatcacacttcagcagggtgatgttttcaaagcctgagtgtgaccatgtcactcctctgttctccagcgctttcaaaataaaactgaaatccgtctcagagggccagtctcagagtatcccctgccagccccatccttcactgctcagcagtcacctccttccccctcctcacccttttgaggtctcttctgatccttcaggggccagcttctctccgtcccatggttgtttgcccatgctgatcccctacatggatctccggtcacctccatcactcttacctggttagtctttccctggcctttatcccaggtcagcttcgcttctgcaggaatgcctgccttgaaacctcaggtccttctgttccccctcttagagcactgggctattctcctgggaggcagtaattccagtagtaatttgcatacatttgtaagcagttttgattaatgcctgttgtttccactagactctatgctctgtaggggacaaatcttgtctgctttttgctcatcaatttttccccagcacagagctcaatactggcactggtaaacccttgagaaaatgattaaaagcctctaagatgcatgcagttatgaagaaccaacagaaggtacaggtggcatgggacagcagtcaggaagcaatttggcttaaggaggaaggccagtgactcacagatggagtctcagcacttcccttgcccgtagaagtgagaaacaatacaggtagtcacagcatagtaaaaatttcaggccaggcacagtggctcacagctgtaatcccagcactttgggaggctgatgtgggtgggtcacaaggtgaagagatcaggagcatcgtggccaacatgatgaaaccccatctctactcaaaatacaaaaattaactgggcatggtgacacaggcctttagacccagctactcaggagactgaggcaggagaatcacttgaacccaggaggaagaggttgcagtcagtcgacatcacgccattgcactccagcctggcaacagagcgagacgtgtctttaaaaaaaaaaaaaatcagatagcagtttcatatgactagaggctgtgggctgatcagatcctgaaaaaccgggcatggaccaagctggctaagaccaagtggacccaacatggtgctgaatttgacctaggattcacctaggacctcatgatgtgtttgttaacatcctaagtcactgtgacttgggatgttaatgagtgacttaccatgttaatgagcatatcacgaggtcctaggtgaccagcaccatgaattccgagaatacctacgtttggtgtaaaaatggatggcatcacaattctaagaaatttccaccctttcccaggaattttcataagtattccaccccttggctaaagaaacacataaaggtagcagccccaaatccccttaggcatggtgctctcttgagtccgcctacactccccctttcttgagtgtgtacttttcccgttgttataaatctctgtacttccactgttgcctgactcatccttgaattccttcttgagacggtgtcaagagcctggacacctgccgggatcagggtcccaccagcatttggggacctccccaagcccactagtatcagtagagtccctataggtaattgtctaataagtggaaggtgggtgtagaagtttcaagaaaccaaagaaatgtcagatgtgtcatttgacccaaaagaaaagcattttaaaggaagttaatgaaatgcagtcagaaaaaaaaaaaaaatagcataaaaggagaaatctgagaagttctacttttaggaatttaatctacataaatacatatataaggaggcaagaatatgtgaggaagtaaattcaatgtgtacacacacatacatacacagacacacatagatatatagaacgattgtaaaaggctatttgtagatttcttgggtaagttttgggtctgtccatgcaatgaaataccactcaaccattaaaaaaaaaaaaaacaaaaaaacgttaacttataggtacttagtatgacaaaataagtaccattagttaaacaaaaacaggtatttgcataatcatgtgagtaatatgaatgtattttcttttttcttttgtttttttaagacggagtctcgctctgtcacccatacggcagtgcaggggcgtgatcttggctcactacaacctccgtctcctgggttcaagagattcttctgtctcagcctcctgagtagctggaattacaggcacctgccacaacacccagctaatttttgcatttgtagtagaaataggatttcgccacgttggccaggctggtatcgaattcttgaccttaggagatctgcctgccttggcctcccaaagtgctgggattacaggtgtaaaccaccatgcccagccctttatttttattttattttttttatttttttgagatggagttttgctcttgttgcccaggctggagtgcagtggtgcagtctcagctctctgccacctccgccttctgggttcaagtgattctcatgcctcagcctcccaagtaactaggattacaggcacacaccaccaagcctggctaatttttgtatttttaatggagacaaggttttaccatgttggccaggctggtcttgaattcctgacctcaggtgatctgcccacctaagcctcccaaagtgctgggattacaggtgtgagccaccatgcctggctgaatgtattttcttaatgtgtgtgaagacatcagtatctaagaaaagattgtgcattctgatatacacaacagggaaagtctaaaataatacagaactattattcctggttagttcctaacattgtttcataagaaaatattccactttttttttccagtttatctttgaattttactaacgggaagtaataatagatcaatgaagaaaaatgtcacagggaccgtaagaggaagaccttagaaaaataagcaggataaaagcatcctctatgccaggagttctcaactgagactgttttgttcccccaggggacagctggcaatatctggaggcattctggtttgtcagaatggggtggggaaattgatgttgacatctagttggtagaggccaagggttctgctaaacataccacagtatatagaacagctcttacacaaagacttccccaagccaaaatagcaacagtgtcttggttaagaaacgttgctctatcatggttaaaatatggttctctactctttgcattctggtaattttaggaggatgacgtcctctgttgagatggtaaggggtcgagagagtcatccagataaaatcggtgttgactttacaatatctgaatcactcataaaattattcaagatagtaactctcccacctcctggtcaggttgacatttcagcaaccaggtagaattggtcatatagcctgttgtgaatccatggatattttatttaattgcgatatgtaaagttctccaaatgtggatgccatagaaccttcggatttaccatctaagccttttcccaattgatctcactctttttgctctaatcaaatgtacctcaacctccatctaaagtaaagctggatagattcatactactccattatcactaaggttcattttatttgcaagcggttttgctcattataatttcattagcatatttggaggtggggaatgagagaggagacaacacagcttagtcttaccttaaaccttggcttgacttggtcgaattttaactctattcttggctcacccaggtcttatagtccaagatgtaaatttacagaaacaacttcttggactctcctgttttttccaatgtcttattagatgatacgtattttctagattttactgagttaacatattttagttgtgttacctatgcaaaaaacaggaatactctgaaacatatttaaccacataattatacctcagcaaaccctccaaccaaatgcccattatatatcatttacttagcctaatatatttccctttttgaatataagagatttcacctctgaacattacatctaaagatgggcaactgtttaattatttgagtaactcaaaaatattttcaacaagagccagggctgtgggaagtgtcctcaaatggaagggttttaagcattttttttaatacaaagatgataacttgcaaccagttctattatttttaactctttgccccttcctccatctcttgggtttgagaagagctggatctttgggcaattatttattccatttccacatctttgggaaggagggacagtgggaagaacaagacccagcacttggggaatttttatgattatctccagctgtgaatgctagggagcatcatttatgcagtgaaagaagtaggaaaagcaatgtcttacttctgacgaagaacttacagttctctctaaaggggtggaataaaattgctattgcaaaaacgggaagatgttgctaatgggaatataccgaatggtatcactaattaaataaagtactttggaattcattgacagcctgcacttaagaatataattgcatattaatcaaccatttgtagacaaaactgaatgctatttattatgttaggataaaactttttcctgatatttcaaagcctgcgattcaactttgttcctaaattcatcttcagaaatgaatacactgtatttgtatgtgaggagcccaagtgaataaataagcaggagtttctgaagggaacaacacagtgggatttatcttgaaaagagcaattgctgacatatgtcacatgtcattaccagagagttggagacagtgttactcattatgtggttacagagtgttctaaattagagaaatggattattggtagtggatgatttccccagattgctacttaatagtgactgaggggtctgcattactcatatttgcgatgaaaatggtgccaaaacccagcagtggttgactgaaatgaaatgtaacacctattgggtattatcttgagatgctgcctaattgtatgcctcttgcttagtatgaatgtcttggggtctcaggggctgggtgcttgcagcagccgcagacggaaagtgaaggtttctaagttatttacctttttgttgcttcctgcctccttgctgccatgcctgtgcacttcagtaattactttacccactcaaaataagtttctccacttgccctttttccattactgggaagggtctatctttgcagctctctgtaactgtccctacctgtttgagctgccaggcttgtgctcctaggtgagcagcccagctactgttttcattcatttattgattaaatagttaagaatcccaactacgtatcaaagcctgtgctagaccttggttctggattgacaggcgaactagtgtatctgcatttctgcagctttcaatctctggggagacagatattaaaaatacagtcacacaaattgatatgtaactcctgctcctcatttaccactaatgttctaactcagcactagtcctacaggcctcttttctcttattcaaatatttcaggctcttttccacctcatggtctttgaactcactcctctttctggaaggctttttctgtggcactttccttttttttcaagtcttgtattttattttattttattttatttttatttatttatttactgagacggggtctttttctgtcacccagggtggagtgcagtggtaaaatctcggctcattacaacctccgcctcccagattgaagagattctcctgcctcagcctcctgagtacctgcgactataggctcccaacaccatgcctggctaattttttgtatttttagtagagacagggtttcaccatgttggttccgctgttctcaaactcctgacctcaggtgatcaacctgcctcggcttcccaaagtgttggggttacaggtgtgaaccactgctcccagcctcaagctttattttagctcccaccttctcagggagaccctccttgacttcccagactggaatgccagcctggccagctactctctgacagtctgaccgatcatttcctccactgcacttatacacctgttagtatgttgttaaagttacatgtcacagggcagagattttgtcttcctcatgtcttcccattggcacctagaattgactggatgccaaatagacatttgttgtgaccagagaaagactctagatgctatggaatattaaaacaaaaagaattaatttggatgggaaggttcattgaaggtctctgtgaaggactagcattgaggttgatgggtaggtaggaattagataggaagagagatggaaaggagtggtgcagactgaggagacagcgtgggcacagcttgaggaggagaggaacctggcaaggttgatcaatccacagatgagtgtgtccagagtgatgtgacaaggggctagagacatcagccttggaggcacagtagggtttggactgggttgtgagtacactgggaagccattggaggaatttaaaggttgggggtacctgatccaataaatatttttttttctatttttatttttttgaggcggagtctccctctttcgcccgggctggtgtgcagtggtgtgatctcatcccactcggctcaccacaacctccgcctccccagttcaagtgattgtcctgcctcagcctcccaggtagctgggattacaggtgcccgctagcacgccccattagtttttatattttttagtagagatgggggtttcaccacgttggccaggctggtctcaaactcccaaccttaagtgatccacccacctcggcctcccaaatttgctgggattgcaggcatgaggcaccacgcctggccctgatccaaaaaatattttaataagatctcttgggctattgggagaacacttgtttgggaggggaagcgtcaatggatgcctatagccttgcctggtacagagaaagtactcagtaactgtttattgatgaatgaatgaatgaatgaatgaatcagttaattaattaacaggagatatcagtaagtgatttgttcttaaaaagaaaccttgcagaaacttgaaggtgtttgtttgggatgactaagcaagggtagacagattgttgttactcataaatgtcaaaataagaattataaaatttagaataatattgttgtcatgctaagtgatatctggagttaagcgtcctctctgacctgcgactgctcgtgagacagttgcatttactcaggtaactgtggctctcagagtcattcttaaatgttttctttttctccccaatgtgtttgtgactttgtccatctggaagtcaagttcattttggccaattaacttcaaaggcctgacttctctatttttttttttttttttttgagatggtgtctcgctctgttgcccaggctggagtgcagtggcgcgatcttggttcactgtaagcttcatctcccaggttcacgccattctcctgcctcagcctcctgagtagctgggactgtaggcgcccaacaccatgccccggctaattttttatattttttagtagagacgggttagccaggatgttagtgttagccaggatggtctcaatctcctgaccctgtgatctgcccacctcggcctcccacagtgttgggatcacaggcgtgagccaccacgcccgaccggcctgacttctcttgtgaagatggctccgttagtgagcgctgtggactaagatccacaaacacagctgctatgcgggttccctttctgcatctttgtgagtttcagtgtcctaagctagccctcatataggcatagactccttgatattttactctgcataatcaggacaggaaaagatataggacctgtattaaagggacacaagattcagaatcacattaacttccaaatctcagtgccttaacacaatttaagtttctatcttcttggccgggtgtggtggtcacgcctgcaatcccagcactttgggagtccaaggtgggaagatcacttgaggccaggagtttgagaccagcctggtcaacatggtaaaaccccatctctaccaaaaataaaaaaaagtagctgggcatggtggtgcacgactgtagtcccagctactgggagaggctgaggcatgagaatagcttgaacctcagaggtagaggttgcagtgaaccaagattgagtcattgcactccagcctgggtgatagagtaagactctgcttaaaaaaaaaaaaaaaaaaaaaaaaaaaaagtttgtatcatgtgtagctctaaatcggtgtcctgatggatggacagttctactccataatgtgatacagggacccaggctccttccctaggtggctccacctttatggttgccaaagaaagagaggatcatatgtgctgagcctaaaatgataaagagcagcacctccattcccattccatctgccaaaagtgtcatctggtcacatctaactgcagaagaagctcagaaatacagtctctgtccttggaggagaaaagaaacctactgttcaatagctagctcagctctgctacaaaacgcctgctatagaaatgggagacaatcatgcattccttttctacaatttatggtatttcatgggtgaaccattaatacgtcaccgggtaacgcattattgaatatgttagtcattttcttttctcatcgtttcttgaaaaagaagttgtctaacagtcctaacttcccatctggcttcttaaaatctgttttacaagcaatgagatagttaaggattttcagctctgtggttgaattactccaaagaaagaaaactgcttttgaagttagaaactgaaacacacagcaacagaagcaaccagaaaccccatagggttttaaccttgttttgtcatatttctcaacaaactccttatttgtttggggattctgcttagctctgtgcagaggtatcttgctttctgtatcacttcaaaccttccttctacgtgagttagccttagggtatgaccacgaatgacaccttcaaatgggaaccttttgtgcctagagaaatcaaatcatctttcaagacttggctcaaggggtgtatcttctgtgaaggtcttacggactttcaccccgcttcgggggtgacagttcctttcttatgcccctaatttatcctgtgtggactatgatagctcccttgctacaataacatagttctttgcatttattttcttaaagtataacaccagttcattacagaaatttctaatttctgtaattagaaagtacagatgttttttaaaaaatcaagtaaatattatgtgtgagtccatgatgcagaatacttactgctgaaccacagggcctgtatggttaatcattgaatcagcgttgccaagcaaagagtgtgacacacattacttccatatcagtagaagggtggaaggatggctggatgggtggatggatgaatgactcacatagcttctcacggatgaacacacctatttactcggcttttacagtaagcccaggacagggtaaggatgagttggaaatgatatatattggttaacaatagccagagcagtactgagagttcccttgtttgcaaacagtacagttttaagttattcaggaaagctggttttctgagtttaaataactaaaatcaggttaggttgtactaggtaacatacaaactgtggatctccgtgttttaacacttgcatattgctctctcatctgagcgtgctgctagtctgttccacgaggtggctcaagacccaggctgcttccattttgtagatgtgccacctggctgactctgataaggaagtggagtcagagttcttgggttctccgcaatggtagtgacttccaatcacggtccaccagctagagctgatcacccagcctcacccaacagcaagagtattttgagccactcagaaggtgatgagaactagacatggatgaacataaccatgtcctatgcagtaccgggtaattgggaagactataataaaaatggtttagcatgtgagtactgggctcagactggttttgagcctctactgggaacaatttgtgcaatcttgggcaagtcgctcaatctctctaagcctcactccctcattgaaaattgaggataataatagttttaattaaataatgtgctaatcactgtgggcattgtgcaagttcagataaacattagttatctttaaatgtccatgaatacttaaaataattgtcattattacaatcttgttatcattggtagaagtggtagtaatgaggtagcacttgggactccacttcagaccacattgaagactggcggaaactgagaagaggcactgaaagcatgcccaacagcaacaatgacagtttactgtcaccatggcaacagcaggaagttaccacctctttccatggcaacacctggaagttaccacccctttccatggcaatactgggaagttaccacccctttttttttttttccattttactttaagttccgggatgcatgtgcagaacatgcaggtttgttacaaaggtatacatgtgttgtggtggtttgctgcacctatcaacctgttgtctaggtttaaagccccacatgcattaagtatttgtcctaatgctctacctccccttgccccctagcccccgacaggccccagtgtgtattgttcccttccctgtgtccatgtgttatcattgttcatctgccacttaagagtgagaagatgtggtgtttggttttctgttcctgtgatggtttgctgagaatgatggcttccagcttcacccatgtccctgcaaagaccattaactcattcttttttatggctgcataatattccctggtgcatatgtgccacattttctttatccagtctattattgatgggcatttgggttgactagcccttttctagaaatgtctgaataacctgccccttaatttgcatgcaattaaaagtgggtataaatgcaactgcaaaactgcttctgagctgctactctgcacacactgcctatgaggtagtcctcttctgctgcccctctgctgctgctgtgcactgccacttaagtaaaagttgctgtctaacaccactggtttgtcctagaattctttattgggcaaagccgataaccttcccatgctaatccccagtctgggggcttgcccgtcctgcatcggtaatacatttgcttagcatcctccaggggtctcaattagtgtcatacaaatgtacatgcctcaaaaggatatatcagaatactccattctcagctttctcaggtgcttccccgtcatactctgaaggaaaatcacactgagaatctcacccacagaaaaaggattcttcattattaaataccattcaagactgtgcactggtttttgatttttttttttaagaaaaaataaggggaggagtgtatccatcattttcttttttttctttatttttgtgaccgagtcttgctctgtcgacgaggctggagtgcagtgctgtgatcttggctccctgtaacctctgcctcctgggttcaagtgattctcccgcctcagcctcccaagtaggtgagattacaggcacacaccaccacacccagctaatttttgtatttcttgtagagacagggtttcaccatgttggccaggctgttctcgaattcctgacctcaagtgatccacccgcctcagccccccaaagtgctgggattacaggcaagagccactgtgcccggcacatcattttcaacatagctgcctcagtctgaaaacgataactcctcactctactattaaccccactgactccatctgggcagaaaggctgaggttaggttgtcagctgcgtcactgctgtggaaacatcgacagactcaataaacaccctgaaatttaacatgcttctgctatctgctgaacagctctgggcacaaataggtttcttttattatggacagaaaggccaagtgaaattttaatcagacagacaaggagggtatctgagaacactgaaatgccagccctgctggtatttccacaatattgaacttgtctttcggggaccttggtaggtatttcaattagctgtgagacacacagcctgtgtttttgcaaactctcctatttttaattaagatgctgttcactgggatattagaaggcacacgattcttcttgtaatatgcaaactatagaagagaaaattaagcagttgaaacatttggatgtagaaagtggattgtagtcatagctaaaatcatagcacttcgtgtactcatagctataatcatacctctgttcttacgtgatatttggggtatcttttcccctcccatcccattctctcgatttcttaactttcaattgcattattatgtatatttgctttaacgtatgatgagcctgttttcctgttttctttttaaaataacgaaatatttggtataaacaaaataatatctgtagcaactatggaccctgggaaggataataaaacaaaaatccgtgagtttactactcaacttaaaaattaaaatgctgatcagtactactgaattgacttgcttgcttcttggtgagtttattttttcatggagataatcaggcaccgttttgccagttaaggtgcctaaaagcaccataaatcactggaaattctagactaaaaagaggtctttctttctttaaagctttgtccatcttttagtcacacggaacacactgaaagaccttccgaaaaatgaaaaggcaactttagggtgtaaggggctgcagggccgcctctaacattcattcgttcattcattggtccctgtatttcaggattcctgcgttggttcctccattccttcattaaatgttgagtatgatcacagtcttctttcaactataattagtagaattaactgctattggctgaatgttcatgtccccctaaatttgtgtgttgaaattctaatcccaaggtgatagtattagaaaatgggatctttgggaggtgatggggccatagagcatagccctcatgaatgggattagtgccttcataaaaaggcttgagtctggtcacagtggctcatacccataaccccagcactttgggaggccgaggctggtggatcatgaggtcaacagatcgagaccatcctggccaacatggtgaaaccccgtctctactacaaatacaaaaattagatcagtgtggtggtgtgcacctgtagtcccagctactcgggaggctgaggcaggagaattgcttgatcctgggaggtggaggttgtggtgagctgagatcgtcccattgtactctagcctgggcgacgaaagtgagactctgtctcaaaaaaaaaaaaaaaaacgaaaaaaggtttgagagacccctcaccgctttaatcatgtgaagttagagttaagggtatctaccaggaggtggacactcaccagacactgaatctgccagcaccttgggcttagcctccagaattgggagaaataaacttgttttgtgcaagccacctgtttgtttgtttttaatttttagcacctttttttttcaattttcttgtgcatttgcttaagttccttgtacactctggatattagcctatggcattttgctagaagcctgaacagactaagacaatgattatgaaaagatttagttataaacattataataatggtcagttatcctgcccattatactcaggttcttttgagaattccttgcgaggtttgataaggacattagattttgtttacatgtttgtggttttagacagcaaacatgcattgaagaatgttagacaggaataaagttgaaatagcctcactcacactaaagagcccagagtgttaattgacatcctgttttccataatttttttcttttgtttgcttgtcaataaaaccctcatgcaacctgagtggaaggggagagtcattaatgcggtagatctggatgattttctgaacaacctaacctcacgctaatgaggcgagtattaccacaggccctttctcctacgagctgtccacccacagttgaagagctaattttactctcaaaactctcacgaatgcttttggttcctgccggctcttgagtagtaacagagtgctttagccctctgtggaaaatgatggaggcattgtcagggcacatgaaccctctaagaagtggatgtggtcccacctctacttaaacctggaccatgcagcttaagggttccattctcaagccagtgaacatcactgtcttcatgtgaatgttcttcaggtagaattttttagcataaaaaattccaacaggccgggcgcggtggctcacgcctgtaatcctagcactttgggaggtcgaggcgggtggatcacgaggtcaggagatcgagaccatcctggctaatacggtgaaaccccgtctctattaaaaaaaaaatacaaaaaattagccgggcgtggtggcgggcgcctgtagtcccagctacacgggaggctgagggaggagaatggcgtgaacccgggaggcggaacttgcagtgagcggagatcgcgccactgcactccagcctgggtgacagagcaagactgtctcagaaaaaaaaataaaaaataaataaataaataaataaataaataaataaattggaactgagtgttagctatttgagtagtctcagctgaataatacctctgacatggtatcattctgtggcatatatttttctgtaaggaaataaaaacaactttcttaattatttttttctgatcagagaaacaacacatacacatctttggaaagacaaatactttgtgcacatatagagaagaaatgttctccttatttaatccaactacttggagattattcactgtttgggcaactttgctgaccttgctctatatttatatacaaatatgaatgtgtgtgtttgtttagaaaaaccaaattgaatcatatatttttatcctgcccttttcagcttgatgaatatctgtatcaactttttaatggctctgcagtgttccattgtatagacatacttaatttatgtatccagtttcctgctgacagacatttagactgttttttttaaatctatttgctttttttttttttaattttacttcaagttctgggatacatgtgtagaatgtgcaggtttgttacataggtatacatgtgccatggtggtttgctgcacctgtcaacccgtcatctaggttttaagcccggcatgcattaggtatttgtcctaatgctctccctccatgttcccccaaccccctgacaggccccggtgtgtgatgttcccctccctgtgtccatgtgttctcattgttcaactccgacttatgagtgagaacatgcagtgtttggttttctgttcctgtgttagtttgctgagaacgatggtttccaggttcatccatgtccttgcaaaggatatgatctcattcttttttatggctgcctagtattccatggtgtgtatgtgccacgtgttctttatccttgatgggcatttgggttggttccaagatttactattgtaaataggttgtttcttattgttgttgttttcaaaacataacacattttaagcatatgattctctgagcaaagttttctattagagtggatgtctcttgggtttaaagaatgggtgaaaatctctttatttctgtgaaccttttgcaaagttggacagcagtatcaagttagccaaggaaggatgtcacacagagtggccatggtggtcttctggagcaaatagagaaaacacatattccagggaggaaaaaaaaaaattccttactttttgtatagcccaatcttattttcagttaataaagctttggccagacatggtggcttacacctgtaatcccagtactttgggaggctgaggcgggcagatcacgaggtcaggagatcgagaccatcctggctaacactgtgaaaccccgtctgtactaaaaataaaaaaaaattatctaggcatggtggcgggcacctgtagtcccagctactcaggacgttgaggcaggagaatggcatgaacccaggaggtggagcttgcagtgagccgacatcgcgccaccgcactccagcctgggtgacagagcgagactccatctcaaaataaataagtaaaattataaaaaagctttacaggtagttccttttcacatataaattaagttagtagatttaggaacgtatccttcactattctgttccatgccaaaagaaataacaaaaacaagatttgacccttaggttgaagttctcctgaactgactgttccctcaatatcttcatatcccctggattgtccttcagtatctaagaatatgggggggaaattaccagaattctccactgtctcatggaaatcacaaggcttgcttggatcgtaatgtgtacaattcactattaacaaaggatatggcattttctgtctgaaccttttcccaacaatccattttctttctctctctctttctctgtctctctctccccacccccaaatccctctctgtctctaagccaccatcacatcttccctgcatggcttttctctctctccatcattacccctacaggccagtccccttatagcttctggaggaatcttctttttttttttccttcatgttttaagttcaggggtacatgtgcaggatgtacagatttgttacataggtaaataggtaccatggcagtttgctgcacaggtcatcccatcacctaggtattaaatctggtgttcattaggtattctttctgatgctctctttccttcccctcagcagatccccacgcccattgttctctcccatgtgcccatgtgttctcatcattcacctactacttataagtaagaacatgtggtgtttggttttctgttcctgcgttagttatcttccaactccatctatgtctctgcagaagatatgaccttattcttttttatggctgcatagtattccatggtgtatatgtacgacttttttttttatccagtctttgtcattgatgggcatttaggttgagtccttgtctttgctatcgtgaatagtgctgcaattaacttacatgtgcacatacctttataaaagaatgatttctgttcctttgggtatatagccagtaattggattgttgggtcaaatggtatttctgcatctaggtctttgaggaattgttagaccatcttctgcaatggttgaactaatttacactgcctccaacagtgtaaaaatgttgctttttctccataaccttgccagcacctgttttttaatatttttattagtaaccattctgactggtgtgagatggtatctcattgtggttttgatttgaatttctctaatgatcagtgatactaagcttttttcctatgtttgttggccgcatgtatgtcttcttttgagaattgtctgtttatgtcctttgcccactttttcatggggttatgtttttcttgcacatttgcttgagttccttgtacactctggatattagacctttgtcagatggatagattgcgaacattgtctgccattctgtgggttgtctgttcactctggtagtttctttttctgcacagaagctctttagtttaattagatcccatttatcaattttcgcttttgcagcaattgcttttggcattttcgttatgaatccttgcccgtacctgtgtcctgaatggtattgcctaggttttttttttctagtgtttttagagttttgggttttacatttaactctttaatctttcttgagttaatttttgtgtattgtgtaaggaagaggtccagtttcaattttctgtgtatggccagacagttgtcccagcaccatttattaaatagagaatcctttccccattgcttgtttttgtcaggtttgtcaaagatcagatggatgggggtgtgcagtcttatttctgagttctgtgttctgttccgttggtcgttgtgtctgtttttgcaccagtgccatgctgttttggttattgtagccttgtaggtaatcttcttaaatcatacattttatcaggacactatcacttacgacccttcattggtttctcattctacaaagagaaaatttcagagatctcaccagaacgttccaggccttgcttctctgacacagacccatgtacctccttcctgacccccatacacaactcacactggtcttttatcagatcctcaaacaagtaaggctctttcatattttagagactttgtacctcttccttacccctcttgggataatctcagtcccacttgtgtatggctattccttctgattctttatatctcactttaaatgtcattatcttaaaaaggcaaatctcaacctgccatggacagcagatgcttcttccttaggtgttactgataaaataatgcatcaatgcatctctgtaaaatgaacctgtgcatctgcttcaggccatatttctgtccctcaacaagcacatcacagttgtaatctgtgtccattcatatttctgtaccactaaaatataggtatagtctttgtttttcattcgtatatcagacttgttgcctagcccagagctgcttacacggtggcccatccaataaatatttgttgaagactgaggacttgggaagggtgtgtgcatgttttcagtctgtgtgatagcttcacctcctattacgtgaattggcccgaagatccccaattccgtgtcatcaagaaacatggacacatcacagactcactcaacatggacacatcaagactcacttaacgcagggtggcttcccaacagcaagctgtattgctgaaaagcaggccttttccagtaagaacatggacaaggacaaacaagagactgcactgtgttctataagaagacacctgggtcataatgagggagagaaaaataagaccacagcaaatgaaacaaaatgtgtaacataccagacaggggaggaatcaagggagctgttcggggagctgctgcaatgcgagattggagctacaaatgtggaaacgcacgaagacctttgcccctatgaatcatgtattgggaaaacagttgagcatctacagacgtcaaataaccaataaaatttcatgaatggtaacgttcgccagtatccgggagaataaggctgagctctcaacatgatctgctaacaaaattaggtcatttgtctttgataggagatggccactttcttattttttatttattcatttgtaagcagctgctttaataagcctacaggatcttggatggcatgctcataagttctagtaaagcctggaagaaaattacaaagggaaagactgcctctaaattaccctaggaaacaaaaaaaaaaagaggtgatggctacagttttaccatgtctttgggggcaaagtgatttccttctttctgtgttcttgttggggaaaaggggaaggtgttaaatcccacagctgcaaaatagattcatttctgcctctcttgtaaagtgaagcatctttccttcccagagaactttatcttgcctcagtcaaccctgctcagagatggttcatccactcctgtcttgcggccattaaacatagcaactcaagccctcacttccagggacttaatattggtcatttaatactgcataacaacatttcatgatatacaacatgtatctctcatgcctttctaggctggctggggtttggctggcccagactgtgctcatttggacagctctgcttcatgctatgggtccagccagacctgtgtcctcacaactgcaagggggtcttcaatctgccctatgtgtgcacattctggggccgggtctaggggaagcagccgtctagactgcttggtgctctgtcatcatcttcacagcaatggggagccacagggggtgggctggaatccttaccactgtggcccacgttttattggccaaagcatgatacgcaactgatggcacagtcaaggtgtagggaagtgtggtccatggtcagtcgctgaaaagttgcatggcaaagggagtgaatacaagggacgtgaagaatggaagaattgctgccagtaattcagtcgaccacagcataactacaagaggctgatacggttatttgacagtgatcgtcaggattagagcacccatcaacctgtgaatgcttacacatttttattctgttttaaaacagtcacgtgtggcttagaaattaaataaaatctggtaattttactatgaaaaaaattattcccaccaagacttccttttggtggtggttgttgttgaaatggagtcttggtctgtcagtcaggctggagagtactggcacaatcttggctcactgcaacctctgtatcaagcaattatcctgcctcagcctcccaaatagctaagactataggcacctgccaccatgcccggctaatttttttatttttaatagagacacggggtcttaccatgttggccaggctggtctccaactcctgacctcaagtgatccacccaccttggcctcacaaagtgctgggatttgcaggtgtgagtcattgtgcccgatccaagactgtctaatgctgtgttaccccacaaggaggctgatcacagcctccttgtggggtgatacagcaagtggcgacaccatggtgagctcgggcccatgaccattcaaagggagtcacttcacagctgcagctgattgtgaccatgtgggaaggtgggcatagtatggccaggctttctcatttctccagagaagtttggcatctgcattttttatgagtgaaatttatagtttttgaatgttagtcactaatacaaagttttatgaaaatgctttgcatgccaaacaaacacttctgttgaccacacatggccagcaggcacccgattgccagcccaccttagactgaaggcactatttgctattttcgacattattggtcaaatctaaatagctagatggatatatagaaaaagaaaagaagagatagaaaaaaaggtgatagaaccaaagaaagaatgaaagagaagatgtatgtgtatgtgtgtagagagagatgatggaaggaaggaaaggagggagggaaaaaagcaacctaggtagatagctgggcagatggatggaatgagagataatagatggataatctttaacgttcagtaacatatgacaagtcacattgccaagtagaagaaactcagcaggcagcatttaaagagaaagtttcacactcatggaggagcaggccagtgattagtgtcagggataatgacccaaattcactgattgtatttcctcaggtgtcaaagaggaacagaaaacgatagtgttgcaaagaaaaagaccagagaatgtctcaccctgggtaattctaccttgcttcatgcacgcttaactagcaacttgcctgtcctgattccaaagcacgtttaggtagtcccaccattggccaggcttacgtgtccctgaacctgcagatttaggaaaaagtaaacagctgtcctcaagagtgcatgagacgctccacatttctcctttgtgatttatatataatcatccccagagagtgaaacaaaggaaccaagtaacttgctgaacactcttgaatgtagaggaaaaattatccacctatcagagagtgtgttgacagtagtgagcttttaatactgaggaagtctttccgtggcacctaaaagttagctcctgcaatattctgctcattggcaaaaatcgtgttcatttttaagagaaatagattatgacaaaagtagaaaaaatatagtcttatactttagatagaactgaaaggcctggctgggtgtggtggctcacacctgtaatactaacacttgggaggctgaggctggtagatcacttgaggccaggggttcgagaccagcctcgccaatatggcaaaaccctatctctactaaacaatacaaaaattagctgggtatggtggtgcatgcctgtagtcccagctactccacaggctgagacaggagaattgcttgaatgcaggaggcggaggtttcagtgagctgagattgtaccactgtactgcagcctgggcaagaaagcaagactccatctcaaaaaaacaaaacaaaataaaacaaaaaaaactgaaaagtccatctgccatgactgtctacatcgcctacatcccacatatccctaagacccagtacaaatgccatctcctccaagaagccaccttgatttctacccactgaaaatcctctctccctcttttctttgtccgttgtgccttatttttcttcctaccctgccacttaactctccctgatttataattatttgtgtgtgtatatctcccagttgactaggaagatgacttggattagaaagctggagactttgtctttgaatcttgcaatactgttgattttggtagatgaacaaaagtgacaagtgacatcttttttctcaaagaaatacaccatgtactcctttgtgcatagataccttcttaaccgagtcgattgacatggactcttaagtatttagcttcttggattctaaagtaaacttacaagttcctgcaccctagggttcctttccctttatcatttagtccttcattcagtgaattcagttgttcctcaaatgaagcagaaatgattcctcttttggggcgtaaagtgtagtgtgaagctttaaaaaataaaagtaaataaataattgcatacttacaaatattgacaggtacgatgaaagaataaactacgttgttctacaaaataaaattaaggtgagtgtagttgggagagaaccctacttaggtaggttggtcctggagggcttctctgaggaggtgatgttcaagctgaggggtaaaggatgacaaatgaggtttgagttgagagcttatcaggagactgattgcctaaggtacaataagagaagagatgggagaggaagttggaggaagaaacaaggccagatctgtacccacacagctaagattatatccctactggccttaacaaattaaagcacttcttcccatgccttccacagatgactcctaatgtcattcttttgcaatatttctaccttctttcattttaacttccgttacatatagctatgcagaaaaaaaatcaatttgttggctaaaataaagaatagtgacaataccaaatgctgtcaaagatcactcaaatattgctggtgggaatgtcaaatgacttaatcactttggaaaatcatctctcattttcttgtagaactaagcatgcacctcccatataattgagcaattgcacacttgggcatttatcccagtaaaatgaaaacacatccacaaaacaacctgtatgcaaatgttcactgcagctttatttgtaataatagctaaagactgtaaatagcccgtatgttttcagtgcatgaatggttacactgtgataatccacactgtggaatactatgtagcaataaaaaagaacaaattattgatgatagacacacaacaactaggatgaaactccagggtgagtttcactcccttgtggtgagtggaaaaaaagcccatttctaaatcattttgtccagtctcagcaatcatttttatgtatctaaaggttacatacaaaatgataccgtgtatgtagcattcttgagtttaaaattctagatatagagaatcaatgcgtggttgccggggtcaggagtgagaggtgtggagtgacagtagggtgtggtcatagaaggcgtctttttgtctgtggactattttttgtcctggctgtgatatttatagttttgtcagatgttacccctggagcaataagagtagaggtcatgggctctctgtatattacttattaaattacatgtgaatctacagttatctcaaaaagtttaatttttaaaattccttcatataacaacttagagtttgaaagatattcacaacatattttacatattaaatttttatttaaatatttgtgttctcctctgccaaattgtaagagctttcccctaagagatcttgtcttaattatctttacatgcctcctctcaagcctcctgttgtcagggaaagaacaaggctctagggtcgagaagacatgggtgagataacaatttcaatgccaggcaaaggactttggcaaattcagagcatgatttgataaagactggaactcacaggcagaaggactggcaggtggcacccggacccttaactccttcctctgggcatcaaggcgcagacatggatgatgccctgtgtgcttgcattctagaacagggacaccactatcctttagctgtattttttggggggttggagagtacggtgtattagtttccattgggttttttttttttttctttttttgagatggaggttcgtcgcccaggctggagtccagtggtgtgatctcggctcactgcaagctccatctcccgggttcatgccattctcctgactcagtctcttgagtagctgagactacaggcacctgccaccacgtaactaccacagatgtggtggcttaaaatgatataaatttattatctaacagttttggtgatctgatgtctgaaatcagtgtcactggcctgcaaccaaggttttgatagggctctgctttctctggagtctattcttctagcttgtagtggctacatgactgcagtctctgcctctgtgttcttgctgtcttccgttctgtgtgtgcctctgcgtctttcttttaaggatgcttgaggttgcgtgtagggccctctggataatccaggttgatcacccattttgtgagcatcagttcagtcacatcagcaaggaaactatttccttacaaagtttataagtttcagggatttttgacctgagatatctgagtggctattatctggcttattagggtaagtgtgagaacagtcttacaagtagggaacaattccttgtgtctcagaaattaactttggcgagatacatggtggcaactagctgtccaggaaaggtgcatgttggaaactagctgtccagatgagatgcatgctgggaactagctgtctgggagaggtacatgctgggaactagctgtccaggtaaggtgcttgcctaggtgaggtgcatgccaggaaatagctgtgccagcgaggcgtgggctgggaactagctgtctaggtgagatgcatgctgggaactagctgtctgggagaggtacatgctgggaactagctgtccaggtgagatgcatactggaaactgctttccaggtgaggtgcatgctgggaactgctgtccaggtgaggtgcatgctgggaactagctgtccacacaaggtgcatgctgggaactagctgtccatgcaaggaggatgctgggactgtgttgatgacatcaagagaccatgtgagcccagcaccctatggatggacaatctcactggcagaattggaacagctggtcccagctggcttattgccaggcaacccagagacagcctctggtgttacccttcacacagttctatccctccctccatatatactacctaatgattgtgcgaacttgggaaagctgcttaacttctctgagcctgagtttcctcctttgtaaaaggagactaatactggtgtttacccttagggcttttgtgagcattaatgatagtatgtataaggtttgtagtaagtgccatataaatgttggctgtaattattatattcttgtttttgatattgtttctatgaggatggtggtggtagtggtggtggcatacctctgtgcattgtagcataccctaagggttggctgcataacgttgaattttagttcgcagagttactgatagtgcctgcccccagccattgggcttcctggtttaaaaggcaaatcatcctgatggaggatggtgcctacagtgtggtgctcgaggacaatccctgtctgcttgggactctgacagtggtagatgctttcagaatttgggttatgagtgattgagggaggttagcaaacggattcctacctccttgtactgtatgaagcagtttgatgggattaatttgcatggcccatagtaaatgctctcagcctgtatggaggctaatttgtgaacctgtagcaatttatcaccctggttggattcgtttaccagtagacaatgtgattgggataatgcgcctcactgtgcgtggagaggagctgcactctgacctcacttgaagaaaccaccgaggggtaatttcctccccaacggatgactgacattacagtgtggtgacaaatgatgagtatggtaaatggttaatatagccagggccaggatctatatgatttatgcaaataattagctcttcctgggtagtagcctgcatgtctaggtaacttttattttttcagacagtcatctccgtaatgagctattagtctgcaggccagaaagaaagaaaggtagaaggaaggacagacctcaggcagttaagtctttgttccttccagaaatcctatttatttaaagctgagtgtgataatgttttcttttacaaaactccattgctctgtattgtaaaagcaactcaaaatatgagtgtctgacgtttattagtttcaataacggtttctggggtttagacagagcttgcattcatcttcactgagttccattaacacggagggacatataccattagcaccatttcctagttagagaatgtaaggaaagatggaggatcaatatgactgtattaggaaggagtctttgggtacaaattatggaacctatgaagaggaaagggcttaaggggttaattattaaaaagcttatctaaggaatattttatataaatataggatgatctgggaagctaaattgatggaaattcaatggcatgttacaccttgagggctgccagaaataggaagtttagcgaagttgggactttctctcaggttacctgttttgcctggccaacgacatcttctgaacctcacgcattacctccctgccaactaggagaggtgaatttttttttttttttttttttttttgagactgagtctcgctgttttgcccaggctggagtgcagtggcgctatctgggctcactgcaagctccgcctcctgggttcaagtcgttctcctgcgtcagcctcccgagtagctggaactacaggcgcctgccattgcgcccggctaattttttgtatttttagtagagacggggtttcaccatgttagccaggatggtctgcatctcctgacctcgtgatccgcctgcctcggcctcccaaagtgctgggattacaggcgtgagccaccgcgcccagccgaggtgaataatttttttattctggtttctatatgacagaggagaactttgatcaccgagattagaatcccttgttaatgcttggactaatctttggtggcaaaggagtcagtgccacctaaggacaatgtttcactgttgggaggtgggtgggaggagtaggtcctgagaggagagagtgatgatcccaacagaagagaaggatgctatgtagggagttgacagattccagcactatactgtaaattccgtgagtgtgtagctatacgtgttctggtgagcatgatatccccagtacccaatatagtacctggcaaaatgataagcatgcagtgaacatatgcatgaggaagggagggagggagagggggaaggagggcagtcagcattctagtatacaggtctgagatagccaagaaaaagcaagcaaaattttcagcaggtagtcacacaaaacagaaataagaagagatcttggccgggcgcagtggctcacgcctgtaatcccagcactttgggagggtgaggcgggcggatcatgaggtcaggagatcgagaccatcctggctaacacagtgaaaccccgtctctactaaaaatacagaaaaaattagctgggggcgatggcaggtgcctgtagtcccagctactggggaggctgaggcaggagaatggcgtgaacccgagaggtggagcttgcagtgagcctggatcgcaccacttcactccagcctgggcaacagagtgagactccatctcaaaaaaaaaaaaaaaagatcttttaactctggagagttatctcagcgatcgaaaccttgattgcacttcctagatttattggattcatttaattgcgcagcccttggaagttttatcctctacctttagaggatttgagtgataaatttccttcttcccttccttcctccttccctccctccttccctccctctttccctcccttcctttcttccctgctttcttccctccttgtctccctccttacctcccttctttccttctttctttactcatgcacatattcacttcatgggctctgtcatttgtacccaaagactcctgcctaatacaggcctattgatcctccatcttcccttatattctctaactagggaatggtgctcatggtatatgtctctctgggttaatggacctcagtgaagatgaaatgaagacccttcccttcccttccctttcttccctttccttcccttccctttaccttcccttccctttaccttccttgcttcctttccttcccttcttcaaatgtgtattgagaaccagatactgtgccagccacgagaaacatctgaatcatcaaggcagcctccatctgctcagatctttttagtaggtgttttattgttgagtatgatgatgtaggagttctattcccaattcatattgttttgaagccacgtctgaattctgagtaactaggatgatgagtagactatgtctccttggagtccctgtttgaggctaggatttaggtgagcaatcctgatcccactcaggagacagcaggaccacctgagccactgacctttaaacccaggatataaaggttatcattgccctctagaaatatcaaattggtaagaaaggaaaatgctccctcatgaatgttcatcaaagagtgtttcccatcaggtgatattctgtcccttcaggccaccgtggaattcattaaagatgagaagacagtgataaaccacctcttgtgcaggaatatttatatattcctgtattcttcaagatgttacaaattccatttaataagtaaagtggttatctcaatcacaaactaccatgaggcaataatgatgatccatttgtcaaaaaccgccactcaagcactaaggagatgtgtgtaacagttggcattttaagcattgcgattgtcaaaccactgattgacagatcccttaattgtcaattcagataataataattctgctgcaaaatgttagagacagagaaagggaaaagaaagaaagagaaagagaaggaaagaaaacgaacggagggacatgagaagaaagggagggacaaagagaaggaggacttgagataaatattagacatgctttggagtttttcaatggcttactgcaaatcgtgttcaaccccacatcattgctggctggttgtctttcttatttgttgtgaagtgattgcttcaaaaaccctgacacaaatctctgtagagtgattttttgtgtggtcaagaattttgtgattttaaaaagactttcaggttcctgctgatttgggactttggctctctctacgctgatatataaatcatattacacaatattgataactccccaatctctaaataaatcgcaaacttattaggaagaatcccaaagaagaagtcaacacctttactgaagaactatttaaaaagatgtatgggtagcatctaagtgctcacgttattcttagtgaatcagaggtctccatcctacgaagcatgggagaggtcaaatcccatgtacgccagctgaaagagttaagccatttttctatttacatggtttatttcacaagggtctgactcattgggcataaccagcacagttaaatttcaaaattactatttggtcctttttttattgactacaattcaaggctgcttcaagcctcccaaatttaatcgccgtagctctttgccaagaacattatgttttattttcagtgttaaactgtgtaagatgcccctaaggctacatggaaacttactctctgtgatagcagctaacggagtgtatcagttgttcatgatttcccattctcctgtaaattgggagaggcagggagagcagtggaatgcgaattttgttctgtcagcactttcttgccccagctttagcccaagcagtgcctgttttggtaattaattatagtgtgtttgtagctcttcatgctcagttaccatttagcaacctgtcaaatcctgagctaatgagcctatcccacagaagtcattgcatttactttattttatttttaagcatcaagacaatactggtttttcgtaggtcagatgaagttgagagggagattctaaaccagcatatggaaaaggcaaggcttttctcttctactcacaaatgttcatcccaagaatggccttgcttaaagtttttcattgatgtttctctaactagaaattggagttattaaatacagttattaaaatacagttattaacgtgactgtaatttaatatttgaaggaagaaatagctcactcataagtgtccttttcaaagtgttgttggtaaacgaaggttgaatggttttgagatttatctcaaatgatgaactacactttgtagggaatgtttcagaggtcttccctctctgtgttgagagactagattaggatatctagcttaggattttcatctaaaatacaggaaaaagcagagcagattcgtgatactttcctctccttgttggttttgtgttgttctttcttctttaattgtggacttgaaggagttccacaatctcgttatgggaaggacttaggcatagcactttggtttccgggcagaggtagaacatactccttgaagctgcttttgtatcacgcttgcttgttttacttagaatcgtacggttacagctcaattaaaatagcagagttttctgagaatgatttcattctctttatgtgagactcagacgatttcatttagtttatatgagacatatcactaatctctactaaaaaatagaaacaataattttatggaattacatatcagaatatgagtgttcagctcagcctctttatggaacagtgtataccaaaaacacatctttattcttagttgaaagttttagaaaacccagaaattagagcagtggcattcgcctctgctggttagaagtataatcttcaattcaacatgcaaaactcagactcgtagctatttctgaagctcagctataactacagtatcatgtggtcagtaagttctgcatttctaaaggaagatattattttcactgtcaatcaaaggtaggtaaaaacacatgtacacattttagcttagctgaccaggtcacagggatgtgtacctgtttatgtataagtgccaggactgaggctggaaggaggaattaagttatgctcccttaataccatcagtgttgtattgtcctaaaaaaagtgtatatatatatatatatacatatatatacgtatatatatatgtatatatatacgtatatatatgtatatatatgtatatatatatgtatatatatatatacaaaaattagttcctcaatccaataagaacatgattctgactctttataaaaatgactcctcttgaatattatttgttcccatctcattcgttgataatatctattatatttttataagaaagagtcaaaaattctatgcaaaattctctgttctcctcaaacagatgacgcttttgcccatacttggctctaatatcataattgattttacttgtcagctctctgttcatcagagaacttgataagcagaagaacagttgctcactcttgttcaagtctactgccctaatgcccatggacctgcaaatttcccaaatgtgagtggtttttatgctgcctgtggaaatctgaatttagatgagccacactttgtagaaaatgcttcagagatcttcctgccgcctctctgtgtcgataacctccatggaactgtgtttgtgagatactcaataatggaaccatttaattcaaattttttaatcgactacggtatcagcaaaatgagaaatgtctttcacccttgatctttgacaatagcagacatgttaatatgaagttactgctaaggctccaaaaggcattgatacaagtatattttttctgccattcttgtttctttatagaatcacacttttgagtattcagagcttgcttttcctttgagttagaggaatgcattggagagaagtgttattgatgagggctgattaagcaaattaatgaattgagacagctgaatagtaagtgagaagaatttgaggagtggaattggtttttgctcattgactgtaaagtgtaggagttaacaccacaagggtacctgatggaacgagctataataccgaggtaagtgaagagagagcatttggaattgtgtactatttttcctcttccaatgaatagctgtgcgctagctgttcactgctttcctggcatatgtttttcttgcttcattttctgagtcatctgcaatagcggaaatgaattcattcaacaatatatattgaatgcccgttatgttccagacacaatgttaggcacttaatggtacttgtggaaatacattatttaatgtctgatgactaaatgttctcagttctgatggagtcaagtgtttttggctgggggtggtaatatttgggaagcatcttggaaagcatttgttatttcaaactcttcaaatctgcaagtcttacaaaacactacacgttggctaagacgcgggggcagcgggcgctctaccgtgctgctgatggaagagtatattgatgcacctgctttggcgctcactttagtaacatcatgggacattcaagatgcatgtagttttgagatatttcatccctaaatgcacacatgaaggagacacatagaagattcattgtggcatccaagcaaaacattaggaagacaacaatcaaccagacattaattgtccaccaatagggaaatagaagataaattgtagcaaaagtcatgtctggtgtgtcatgttaaaataaataaattagatctctgtgtgccagtgtggataaatctgaaaaccataatgttgaacaacaacaaaaagtaatttgcagcaggagacatacagtatgacatcatttatgtacagtttttggacacagtaaaatgttttcaaaaatatataaatgtattcaaaaatagatattccaaaatatacatttatatgtatttatatatgaatgtgcccaaaaatatatattctcttggggtctatgcatatatggtaaaacgagatagagctatgtgggaatgatacacagtaagttcagcagtatgcccaccactgttagggagtaggggagcggttgtaatctgcgagagtgactgacaaggattccattatatttgttatattttatgttgcaagctgcggggtggacatacggcatttgctccagcatcttccgtattttttatatgtctcatgtattgcataagaaaaaagagtgcatctgaacagctacagttaccgctgtgtctgtgtgtatttgcatgctgagttttttgagcaccacactctaaccatagtctttgcaaaagggttttatacaaaaacaaggtccctttcgagtgcattgtcttggtaagattgttaagggcagatgagtaaagagatgcagtaccctcaatctacaagacaaaagatggaccagtcaagcagttccctaatgtctttgatcaatgtaaactgctaattgcaaggcctgactctcttttccaaaaggaatgattcccctcccaaccccctccccccccgactcaattacaagaataattgcttcaactctcaatgttcctttaactgggcacgttcagtgttagcatcttaggctctcatttcatatgaaagtactaagttgttccagtaaacagcctctacattgggtctttatgttgcaatattacagacttggcatgcaacctcctctatttttcactgtgtataatgaggtcaaattcgttttggaaggcccggaagtcttcaggatttacagctatttgaaaaccctattgataataagtatttggccaaagtgtttccacgttcatacactccccctctttcctagccagcgtcccttggtttttttttttttttttttttggttttttttttggtctagcttgcactttctccctgcccagaaatgtcgttaacattaacaagagctctctctggcactggcagggggtctgcaaacagaactggtttggaatatgcaatgggaggcttgaatcaaagaaaagctgtgatacagactgtggagtgtgtaagacaaactcgataagctccagtcaatactgtcaggaaaaatcacagcaaaactgatttcgatgagaagatgtcattgggctgtgagggatacttggaaaggatgcttcagcaacaataacaacaaaagagtttttcatttagattgtgaagggcttgctgtgtgtgtcatgtttagggacataaataagtactgacccttactctagagagttattgcacataagaaacccagagtcctaggccacctccagagattttaattctgtaggtctggagtggagactgtttgccttgtgaacaagctcacaggcgatgctgatcgtgcaggttcctggaagcacattttgaacaccaaggccccagagcaggttcaatgaaatggaggaagagagtcaaataaaaatcctttcattcggtgctatggggatgcaatggcagagttattagcaatattacagttacctaggaaaaggagcaaacagctctgccttgcccaggcaaccagcagaatggaggtgatacttaaccagcatcttgaagagtgaagagatttccaggaagaaaagagagttcatgttacaggcagaggaagtgacatgaatgaagtacaggacacaaatggaaaatgaaagtggttttgtatgaacagagctggaggtagaattggaatcatcacagatgctgtttaagaattgtctgtggctcacacctgtaatcccggcgctttgtaaggccgaggctggtggatcacctgaggtcaggagttgaagatcagcctggccaaaatggtgaaacctcgtctctactaaaaatacaaaaattagccagtcatggtggccggcacctgtaatcccagctactcaggaggttgaggcaggagaatcacttgaacccaggaggcagaggttgcagtgagctgagatcacggcactgcactccagcctgggcgacagagggagactctgtctaaaaaaaaaaaaaggaagacaggccgcagctgatttttgaaggaatttgcagagtccttctaaggtgtttggtacattattctatgatgtatggtggagaacagtggaaggatttttacagattattggtgggagagtggatgaagagaaattaataagcaggggatcaaaagtctaggtgaaaaaacaggagggcttgcctgaattactttttggaatagagaaggacatggcacaaaacattccaacctaaaggcaagaccctcaaggttggagacgaagtatcttctggatgcagactgggaaaagtgattagcagcaaatggtcaagatgaatgggtagagacaaaacgtggctcaccaggagggtggtgactcactaatcttcaagaatgtatggctaaagattcaaagctccttactaaaatttagaaaaggcccataatggaaggaactaagcaagttttgccttctgctacctctgaattcattatgttgcctgtacaagtagaacacatagcaggaactgtgttttaatactaattacaattattttctggttacatagataaatgtaaataacattaaagatgtgatctgttcctggacgccatttttatcttctttgtcagaaggagggagagagaatggcatcaaaataccaaggttctgtttttttttttccttaaaaaaaaaaaaagaaaaaaagaaatgaccggaagcacaaattggatgcctgcgctttttttttttttttttttttttttttaccaaaaccaaatacaaccttacagaggtaataaaccttgtgatacagtctcaggaggatgtgctatgaaaggagccaaatcaggtaaccagaaacaaataccaagttctttactggtattttgaatgtttattaaacagttaccaatccattgccatttgtttccttcacactttgtgctccctccttcttccttctcttgcaaaatcctcacaacttcttctgtctttatgttcctttttttttttttttgttgagattatgccttgcaaaacctctaattaacctgcctagcaaaagctgaaccttcttcagactacagggagagtagcagaaaaaataaaagtgacaaagaagaaagcgaaggagtctctttagcaggaagaaggaggggtcatttcagggaaattattttaataattcttgtcccattacataaataattcacttttttcttctatgtcactgtattcctagggttcttctcaaagcataactcttccacatttagacacgttcaaaaataagaaattagagaacacacttcattctttccttatcctatccagttatttcaagacaaacatttgaaaaacaataataatttcagactgcaataaaggaaggctatttgttttacttttgcaggcacagaaattttgtgaaatcaccaacaattcagaaaagaaatgacatcatcatgcccgaaaaagtataaatgacataatctcaaattaacacataaaaacgttaattaaaaatttagttttaaacccccctattctctccttcctcttttttttttttttttaatcatggcctaatacatcaaaacaggctggatgtgtcaacggcaggatatttgagaatcaaggatctgattcaaatgttttatttgttcttgatggaaaattccaaactggcttttaaagcctttcaataatgcatggaatcctgaagaaaaagttgcttcctagaagatgttgctctgttcaacctgtatttttaagtgtctttttcctctaatgtgggtttaaaaacaataaggagagacatatgctacttgggtattttgttgaggccatttccctttttttatctgaggtcatgtgaatggatactcatcaaaacaagaggggcgtttttggtttctctttttgctgataaatcgaaaacacaaaggtcaaaaataagccctgttcctcaatcccagtgccaatgttggagtgggtttttctttttcttttttttttttttttttttttttgagatcgaattttgctcttgtcacccaggctggagtgcagtggcgcgatcttggctcactgcaacctccgcctcctgggttcaagcaattctccacccttagcctcccaagtagctgggattacaggtgcccaccaccactcctgggtaatttttgtacttttagtagagatggggttttgccatgttggccaggctggtctcgaactcctgacctcaggtgatccacccgccttggcctcccacagtactgggattacagacgtgagccaccgtgcccgacctggagtgggttttttaagtacttataataattacttgaataatatgtgttcattgtagataacatgaaaaatgcagaaaaacacaaagaagaaaaatcatttctaattttaccagtgtttatcattagtgtgtgccatggggatatttcctttctagccccacacacccaggcaccttcttgttttttaacatttatttaacacatggttaatgacttgctactatgctgcaggaattgtatcaggtggtagaaatacaatttgtattaattgtagataatattttgtgatacattattttttaatttaataagatactatggactgagatgtattcttcatgacgtgtgatgacaacgtagtaatccctaattcctttagttaataagttcattttaccttctcattttgcctctcatttgctattttatcacctttcacaaataggtttatttgttgttattttttcctgctttatttgtaagcagtattagataacagttgcacacggagaattttcaggtacaattaacttctctcttttttgcgtgtaggcttatttcttcctgacaagtcttttgccttctaagtaacttagtgttgaaacattacatgaaaaagccacctcatttggttcttgcacagtaatgtctaaatcacataagaaatgcattgaaaaaaacaatcggggaaaaaagagggagtaatattggctagcacatctttgaatgcatctggaaagaaaagagtaaatcaggattgaaatagaagccaaaagatgatatttttatggaaaataattcccctctccttttctttccccagctctttttctatctaatatgcatttttctttatattataaaacagctttgctcaccttatctctggtagttctttattacttcagtgtcttctcatcattttttaaggttctggaaatgtaaactactttcctaccacttttcatttttgtggatagggtggctgatgggctttaagtttcaagctatgatgaaacaaggaaatagatcacttcttacagtgtaataatggaactctgttgatgggtctaataaagaagaaaaaaaatcaaaccttatccatcatctccatgacttctagtgtctttcccatctgcatcttcatgttaagcaaaaaatatataatgcaaaaagtgtgtttcacaaaggactttttttaaaaaaaaaaataaggttagggctttctttccttctattttttttttttttttttgagttggagtctcgctctgtcccccaggctggagtgcagtggtgcgatctcggctcactgcaagctccgcctccccggttcacgccattctcctgcctcagccttccgagtagctgggactacaggcgcctgccaccacgcctggctgatttttttgtatttttagtagagaaggggtttcaccgtgttagccaggatggtctcgatctcctgacctcgtgatctgcctgccttggcctcccaaactgctgggattacaggcaggagccaccgcgcccagctaaaggttagggttttctaaggttgtaacttttgcatgtgtattacttgccacacaaagcatcaagataaggaaaccagcccttatgggtccttagcttcatgacaatatctaaaggtcatactgttttaagcatacagaaaaccctctagtcagagtctgtgttagctgttctttaaaaaaaaaaaaaaaaacttccatgtcttgctattattatgagtttgtatttaaaaatttcattctaaccagcaagaacacttccagtgggaatttctgataaagcagtcaggttttagcttggagatgtactaagtgcagaagttttgtgagttttcttcttggtcttgcaaagaaaagcatgaagctatataagtctttctgtaggggaaaaaaaaatactttttttcttccttttttttcctttctgatgagcatggatggaggagagatccatccatattctggatcattattggctctgatgatggttttgtacaaggaataacctctcttggggtagtgattctttttaatgacctttataaaccagaatttttgttcatctgagaaactaatgaggattaagggaagaaagggggccgggtgtgggggctcactcatgtaattccagcactttggggggccgagacaggcggatcacttgaggtcaggagttcgagatcagcctggccaacatggcaaaacctcatctctactaaaaatacaaaaattagccaggcgtggtggtaccggcctgtaatcccagctacttgggaggctcaggcagcaggatcgcttgaacccgggaggcagaggttgcagtgagtgccgagattgcctgggtgacagagcacaagactctgtctcagaaggacaaaaagaaagggatccaacagatatttatcagttaatgtgtgaattacccatggcatcattacctttaggtttgctcagaacaagtcctgtttatcccttgatcctggtgtaattattgacatccccctttctgctgacaggtgtcccagtttcaacgatgtattatatagtcattccatactcttaaacaagagagtaatcaaatatagaagccaagcgtccagaactatggctcagacaaattggcagttgaattttgatttctgtacttgattttttctgagaagctgaaactactatacttcagttaacttatttgcgaaatataggtattatagtaatgtttttgccgtatgggtgttgagaaaattaatatgtgaaattttgatcaaagtacctgataaatagtaaatactcatttgaaattagcaaataattattcctatattttttttcattgaagtctttcagtgctacatgttacagcctccaagtcatttaatttatagaaacagaaatacttcgtggtctgcagcagtggacacaggaagtggcttataagaagatggacacagaaagtggtttgctgaagtaagaggatggtaaaacagagtggattcatctatgataagtgtctataaagggattatggatctagagaaatttctgtaagttttcttttgggttagtgttcaaattggtaaagttgccagggcgaggtaggaaagtcacattcaagccagtgtttcatatttattggtttatgatttttttttgagacagtctcactctgtcacccaggctggagtgcggtagtatgataacggctcactgcaacctctgcttcctgggttcaagcaattctcctgctttagcgtcctgagtagctgggattataggcacacaccaccacgcccagctaatttttgtatttttcctagagatagggtttcaccatgttggccaggctggtcagaacttctgatctcaggtgacccacttgctttggcctctgaaagtgctgagattataggcatgagccattgcacccggccagtatttcttaaagataggtaataaggttgcatctttttgctcctcgaaagatgggctttgccatatgacttactttgactaatgaaatatgcagggaggtgatgtgactttctcataggtggatgcttgaagtgacattttgtgagttaccacattttctagcccttgccttagagattttggatacatgaggtgagagaaaccgtctgtcagctcatgtccctgagtgactacaaaaaacaaaagttccagccaacctgtattgagcacatggtacgaatgagaaataaacttccattgctataagccactaacttcaggggctgtttattacagcagcattgtgttgcccatactggcttatgcatcttgcctcttgcttacctgtcatatcttctgctgctttgcacgctcatctcttccttcccccacttgccattatcagcaacacttgctgaccacctatatgtgcaaagtgcttggtgtcaatatgtttctcataagaaccttatcaagtaaatacttattatatcttgccactgccagatgaagaaatgggctcagagggtcactgttcacaaatcccatagttgtaggtagagaaagagtcaaacatgggtctttcaagctccaaattctgttattaaccactgtggtatctgtcttgtattaggaaggagttcccttactgtcttttgaggttttttttttttaatgtaaatgccctgagtttttcaacacatataaaagggttttatgaatcctttttgttcataaaaggagattaacattaatttctgtgcagagtaggatgaaatagagaaagaaagaacaggaaaaatataattggaatctgttttcaactctgacgtgttagaactaggatttttacccttctcaaaacaaattctaggacacacattcatgcagttggcaaagccatgtgactctagagaaccgtgttgactgattggaaatgggtaaaattctaaacagcatcagcttgatgtggaatttccaattacttaattctggttggttttgaagacacatgagctgactgcttcacgggaatcaggaatgaaggggaatctgttcagaacgtatatgtctccccgcagtaaaagcaattcaaagccataaattacttatatcatctcagcgtcttggggactgcttactaatcttaggacctataaaataagggatcaaaggtaacattttctacgttgatgctgtgagatctatgcatatctatctctcagctggccctacgagtttaaaaattgttaaactgacaatttactaatccttctttttggatgatgataataatgatgattttttgcataaggctcttggaccacctagttttcacaggatggtgatgaatgagtttagggtttggcccgaaaaccttatttcatctagaattttgcaggcagagccaagagagttagcagcctggggtggggcaatggagagagcattccctttggtcgcttgaaaaaatccgtgcctttttgtttgtcagcactactgaaattcagcactgctaggaaacagaaatctgatattccaagatgctcctattggattttcacatatctcatttgcatttggattgtttcagcaagtcttacctcacttctgatacctataaatatctaaggttttagttgacacacgtctggctagcttcacaacaaggatttaagagcttcatgatattatttgccatgaataattgctagtggaacatactggatcaccttgtataacttttgcaggctggttttaatttcaggtttgactgttacattgtagctttgcaaagcaataacaaatcataatgtagatgagcagaaacaaaacaaacgatgatgggaatattaccataaccataattttacagcacagtttaattatttggttcagtaatgttgaataattatttcaccaccaaaactcctccccaccccagcccctcaacaaactaaacaactgtttcactactagcaactaatttatgaggcaatttcagattcttatgacttcttgtcgctctgagatttacagtcactaataaaaggccctaactttgagagacttgaattaaaactcatttataaagagaataaaaaatcagactttttccatttctatccgtaagtgtccatattcctgtagacctggatgtaagtggatgaagcccactatccagtgaataacagatgctcattaaatattggaaagcaaatgaagtcataaatgcgtataaagtaggcagagtcttaggaatggacaagatgacttatctttcttcttacattctttaggatggaatttgatgaaggttcctttcttttgtttttgaataaaccaactgaagtttaattccatgtttcagaaaatcacccctgctttttttggagatggagtgttgctctgtcccccaggctggagtgcattggcatgatctcggctcactctaacctccccctcctgggttaaagtgattttcctgcatcaacttcctgagtagctgggattacaggcatgtgccatcacgcctggctaatttttgtatttttagtagacatagggtttcagtatgttggccaggctggtctcaaactcctgaggtcaaatgatctgctcacctcagcctcccaaattgctgggattacaggtgtgagccaccgtgcccggcctcaaaatcactcttgactctttcctctcccttatccctcatgcccagagatcaactccagtggtttatcccctcttaattactgactgaaactttttgcttctctccattctccttctattctcctggccaaagccactcttccctcctgcctggagtgctgtcaacacttctaaactggcctttcttcctccactcttgtccccattaatctattctccatataccagaaagagtgattttctgttacatgatcgccatcattcttgctgaaatttctactctaccttccgctgattttaggatcaagtctggaaatgttgtcagtggccctcaaagtgcagttgctgcttagcctatcgtgtcctaaatccgcatctgatggcactttgtcacaatccaggctctttgagagagggagagagtctgtgtgtgtgtgtgtgtgtgtgtgtgtgtgtgtgtgtgtgtgtgtgtgtgtttccctcggtagagtatggggatctctgaaaccctttgtatactcaatcctattgttcattatgattgtgtgtaggtatcgtttctggaaagcctctcagttacatacccttctttgtcttttcacagcataattgtaatggtacctgttatgttttaatatgatacgctttcttttccaccaaatggaaaactgtgagagcagtactacgtctgtcttagtcaccaacttgtgctcagcacctagcatggagaccagcacatagtagagatttaataattgttgtgtaaatgaataaaacacatctatccagttggataacttggggtagtttgcttctctgcagtctgtctccctctcttccttcctcccttctctctgtttctctctttttctctttctcgtagtaataatagctttactatgaccatagctctttttttaatcgatcaccttttaacactttaagaactatttctaaaaactcaacttaggaaacagctgaattagccccttgctttaggtttcaggcttccctgaattccctatgattttcttatttgaaagtctggttcctgtttatattggaaacattctttaaaaaaagataagaacgtttggaacggcaacaaaacacccaattaatgtgcaactactttgaatattcctgcagtggcaacggttaaagtagaatgattggacactgtcactgctagcaaaattataatccagggtaagctagatttagagttgtgtctcaaaacctgtgttttttgtccttcaggagttaaaagtgcaaaaaaataaaataactgagataagagttgaattgatgccttcgaacaaaatggttaaattctgtttgggtctttaaaagagttaacagaatataacaattcaaagactccatgttccataaaaattgtgctattaggaagaaagccatacttctcagtaacctccctgacacttgctctgttttacttccccggccgcagctggtcttgagtataatgccattgattttgagagatcttataaagataattagatatactgcagtgtgttctatattctcagcatttctgaggctatgcaaagccacccaaacttctgaaatatgtaccttgtatttcttacttgagaaacttttagtttctatgcattggaaaaaaaaaaaaaagctctatagcagactttcctcctgaagcgtgaagaaggaataaacgaggagtagagatttttgcctcctttttcatttatgtaaataaacgtatgaaatggatttttaatttatacattagttatcttggtcccaaagcataactcttttaacaccttgagcttccttatgttggagggggaaaaagagtgcaaaatcattagagacatgattatgctttaatttaggtctttgagttatgtaagcagaatgcaattaaagaagaagtgctcactatgactacctatttcaaataggctttcaatttttcagttttatgtgtatcttctgcaattgcataaaacttcctcaaggctatgacagtggattatggctgtgttcttgtaattattttcagcttaaaaaaaagaacaactttgctgcataaactattgagttaaacatattacacgtctagtttttactgggattgtgtaagattttacaccagccatgagattctctgcattcataggtttagaaggaaaatgtgagtatttatggcatcatgattgtcactgtcactatcatcctctcattgtcgtcatcaccatgaaaatcagatccacaagtgttatcttgcttaattattgcagcaactctgtgatctttattattgccattttccagataaggaaaccgagactttgaaacattaagtaacttgcataaagtcagacagctaggaagcatagtatctgaaataggaaaccattgctcactttggcagcacatatactaacattggaatgatacagagaagattagcgtgacccctgcacaacgatgacatgggaatttgtgaagcgtttcatatttttagtaaaagtagaaatacctgttgatccattatctaccaaaaggaaaagaagtcattatatgaaaaagacacttgcacatgcatgtttatagcagcacaattcacaatttcagaaatatggaaccagccgaaatgcccatcagtgaataagtggataaagaaactatggtgtgtgcatacacacacaaacacatgctactcagccataaaaaggaatgaaataggtcaggcaaagtggttcacacttgtaatcccagcacttcgggaggctgaggcaggtggataatctgaggtcaggagttttgagaccagcctggccaacatgatgaaactgcatctccactaaaaatacaaaattagccaggcatattggcaggtgcctgtagtcccagctacttaggaggctgaggcaggagaactgcttgaatccaggagatggaggttgcagttagtggaagatcatgccactgcactccaggctgggcgacagagcaagactccatctaaaaaaaaaaaaaaaaaaaaaaaaaaaaatgaaataatggcattcgcaacaacctggatggagtgagaggccgttattgtaagtgaagtaactcaggaatggaaaccaaacatctcatggcttatctcccacttacaatggttttccattcccgagttccttaacattgtgttaatatactaacatattctcgcttataagtgggagctaagctataaggacacaaaagcataaaaaatgacataatgtactcttgggacttgaggggaagggtgggaggtgggtgagggataaaagactacatactgattgggtgatgggtgcatcaaaatctcagaaatgacacccaatgaacttacccatgtaaggaacattacctgttcccacaaaactattgaaataataataaaagaaaaacattgttgaaaagataaaattagaaaccaagaagcttggcttcataacccatgttactaatcttaaaaatgattccaagttgggcagaaaatggggagaagttgtgagtgggagcaagtgtggtcaagaacagggcgaaaaaaatgtaaggactcaaaatgtaggttgtaatcttatcaattgactgtgttaccctaagttgcttataccatttaatcatataatgcctacagtgcttgtgcacataatcatcttctttgtattattatagtgctacggttgatgatgatgatattatcactattgtaattcaggaaatttcagtatctctgaagactcttcggttgtctaaacaatacaactcgttatggtgggggtgcgttttttagagaaacatttatattttaatctgtcctttatacacagctttgacctctcctgtccaatatgacctacttctctgaagctggtagtggtttttgaggtttcatttgcaatgtgtggcttcttcccaggactcacacaagattcgctgagagtcttcgaattttttgaatcacccttaagtgcagtatacatcaattcagtgctctggcaaagactatgaattatgtttatgtctgaagcaaggccgtggttaaggaaaatagtagatgtgttaagaccttgtttatttcagcagagaaggttagagttgatccacatctggataaaaataattttaacctaggagaagttatattttctttataccataagctccccttctctggtagcctaaatgaatcagcgccacatctgggcatggtggcccatgcctgtaacagcagcactttgggaggccatgacagcaggattatttgaggccaggagttcaagaccagtctggggaacatggtgaaacctcatctctacaaaaaaattagccagtcatggtggtccatgcgtggaatccaggctacttgaagggctgaggtgggaggatcacttgagccggggaggtggaggttgcagtgagctgcaattatgtcactgcacttcagcctgggcaacacagtggaacttgtctcaaaaaataataattccatttaaaaaaaataagcaggcatagtaacacacgtctatagtcctagcatctcggggggctgaggtaggagggtcacttgatccagaaggaaccccggagattgaggctgcagtgagccatgattgcaccattgcactccagcctgggcaacagagggtgaaggaccctctcaaaaaaaacaaagcaaagcaaaacaaaaagcatcagcaacacaatccatcttagattcctgacatccagtctttctattcttgggaattgtcctagaatcacccagttgcttcctggtcagcatattcaatggacaatgaatgacttgttgactattccaccatcaaagaaaaataatattaataccatccaacccctgaaatgagcctatgttctatgaagtaaattagctgaaacaaagtcactcttaaaaatgaagtgatatcaaaaatcaccaccttggtttttgtcactattttatcttcatcacatagcgctgtacctagcacacagtaggcatttaatatttgtttgcaaaaaattaagtcacttctataaaaattaatagtgtgagaaaccttggactttatgatgcaccatactagagtaaaagacttgtatctattttttttttctaagagtacatttctcacctagggttctatttcttaatcttggctggaaccaaagaagttgttatctgccgtctgatcaagagagaacccatagtccctgcattgtaatttgtgtgctttttcttatttatatttgcattacaagaaaacatgaaataactgtatctgctaaaactgaccgaaagatggatttcagatgtgagcaatggaagtgggattggcattcatcatagtgtaaatgcaaaagtgcttttagcccaccaagtactgggtacactattctgaccttttttcaagtttctcagtatttatggaagaataatttgtagaataatgaatatagttttccagtggagcaacaaatgcatactatatttctgctattgtttcttattaaatattcatatgtatattttgtgtttgcttcataactggccatttactggtgcttaacaagcataggcagtcccgctgaagagaaataacaccaaacaacagtaaacaaaaaagcagacgaatgaaaaaagatatcttatttctgcagccgttacatttaaaaagtgcatttaacatttttaatacagtccatatttcataaatcccacatgttgacatgtcctagagaaagatggatgggttgacttggaggtatgcttctatctagttttatgtgtgcatctggcagagctaatctttacttccctttagcagaacacaaaaatgtaattctctaataactgacataactgcatcattttccaatatggactgcattattaaatcacagagacaagcaaaaccagagtagtggggaagcttgacttctgcttgatatcagaccataaaatgcctacttactgtggccgaaaggaaaaagagcatcgactctcagtgcttggaattcggaacaacttctgaattcacagccccagagtcttgtgtgtgtgcaacaataaccgtgtctttgcatttgcatattgctttagagttcacaaagcatttttacggacaagcccatactgagaatcagagcaaggattgctattctctgtgtatagtgagaaaatagaggctcaaagaagtttccaatatagtaagaattatttctgtaggacttttaaattgtataaattgctttaacgcatgcagttacattttgcttgtgtaactaggagaataagtcatctaacagtcttcttcctatccccaaaatacccattcaaagagaatagggaaaggattgcttccagactaagaacttaggatcttgcgaatggtagttgcaaaacatacacagagtcttggattagcaaaaagtaggggataagggtttcagagagccgagtcattgtgcttaagcatataggaggaatttaaggatgttgttgcctctaagagggatggagctgaaagacacacaagggtaggacagatagaagagagaatggctgagatatatggtggcgtgtatgcaaggacttctaagagaagtgatagctaatgtttgtgttgctacaatgtaaatacttccacttccccaagcaatatattgtatggtcaccatgcaggctcatcaacaaagattccgtttcttccctgctgagcactgcttgaagttcttgtgatttgagtgaggccatgagagcagttctggctaatgaactataaatgaaagtgacaggtgctggaacattttattgctgatgcaagagtttctagaaatttcttatctctctgatatggtggctagaaatatttcagatgatggattttccttcatccaagattgctgagagtctttgagaagcaacaccaccctgtctcttaccaccaaatccatgatggacatgtgatatgagcaagaaataaacttttgttattcctggaccttttagattttggagtcatttgttgccacagcatcacatggcgcatcctgactgacacatgcagtgtcctcatgtgaacattttgtttgtgtgttgtcaaggaaagtcactgtggttcgtgttagcgtcagtttaattcaaaggtaactcaacagcaagaaacagaaagtaacagaaattcagcaagggcaagaaatggaaacctgatatatcccatgagagtttaaggaccctgacaatctgcagaaattttaaaaagtgctttgggcttttcacaaagtatagaaaggggttttggaaaaacctatttgaagttttaaggatcagagagaaattaacagctaatctttgatagttctcccagtaccatcttcaagttaaagaaaagggtaggattttttttcccctatgttaggggaggaaattaaaactgagataaataaaatgacttgtataaggtcatgcaaatgctaataagcaaagcccagattactaaaccatttgaccacacgtgtagtagtgtttcagcccactcttttaagaagttttcagaaagccaatgagctaatagcttgaatatattacagtttgaccttcatttcagcaggacagacaaatcattgacaaaacggctgcaagaatatcagcccttttaataagttgtccagtaatatgatatttttatgattattcaatgaattgatttttatggaattggctttcagtgaatttatttatcagccagttttctgaagggcagcccaacactatatgccataaattttctttgctataattaacttcagacactctgtctcctatctttcctaatttcatctctctctctgccctgtttatatttattggatgctctggtatgtaattattagaattttccctttactttaaaaactgttctttcatctttgtgtgtatcattgattgatgaccccatcatgaccttaattgcaatttacaaacttacttgctacaaagttaggttaatgagattattcactatacaggtagattcaacataagtttccattatcatttttaaagccagtatcatccactaaacatcaatatgtcatgcgatgttttaggagcttcaagtaaggtccagttgtgttatttcagttaactatgttgtacgtctctgtttaattgtaatattcttttctgtggaagtaaattctacctctggatcctacttaacagtgttcctggctgttactaacccttcctctgatttgacattggaatggaagcatttttgatgttctatttatgatgttaaatttacaaagaggtttgagacattttgaattatctcataaatgtgcaatcttgcctcacagttaaatctgatcatttcttttaaaatattatttaaattttcattgcatcatttcttctatctgttcagtggcatttctacttctttatttgttaatcttctgaaatagtcttaatctttcatacttgaagcgcctctgtttcctccatccatgcaagtaaattttcctccagattcaactcctttctccttagggatgttcctgagagtcccctgacctttcgagttacttcttgtcagtggctggtgttagatgcacagttctctaatcatgggatattccacctcaatctgtgtactcctttaaggtataaaagagcaaaattttccaccggggggtagcaacatgacaagaagggaaagagcagagttaaccttggggaaaaaaatgagacataaggttggctgggtagacgaggcagccagagagacagcctctgttgttcctgaccactgccttggtttttagtattatactttccacttcagtcactgcaacccaccgccctgttgcaggaatgaacatgtgacccaggtgcagccaatcagggtttgctcttcccctgtgttggtcattggtccaaggtggacaaatgatgcaaaagctgggccaggtagagagatttcctggaaccttgctagtcaggttagacagcttcagacacgtgaactcggagaaggccagaatctgtttttctttctggactgtctgaaatgtgaactggaagaggcagggtggggaaaaaatcaacccaaataaaattagcagtaaagaaatctagataaaaagagcactgagctgtatgatgttccagagtcagtttgacttcttggacgatgattattttatgattgtatttgattgcgttgtattaaaattattgttatatttttattacagtatttcttatattattgaaagaataaatcaatatataaatgtgttggaattgctggacagcaaactatatacattttatgtggttgacagaaataagctacttgaagctgttgagcttgagcagagtgacaaaaagatgtaaatgctacattaggagattcaatctaataacagtttttcaagatgaatacacagtgagagcctaggcagggctgaaaaatacgtggcccataccctccaccttcccctcctatgcctgtggcagacattgctaatcaatcatggcacttttacccactgagtctgagctggtcttaccatgcttctcagtgaagcgctccaggcagtgactatagatgatcagagctggcacacaaaatgaaacccatttgctctcccaagctcacaggcaaggagaatagccaggagtctgagcatgaattagatataaggttcccaagattggacctaggtggggagagagcaaaggaaggggtaaaacctatcgttgacaatattagtttgcttggactgccataacacagtgccacaggttgggtggctaaaacaacaaacagttactctcacagttctgcagactagaagtccagaatgaaggtgttggcaagattggttccttctgagggctgtgagcaaagggtctgctgcaggcctatccgtggcttgtagagggtcagctacatagagagcctgtgtatctttacatcatcttccgtctatgcatgtctgtgtccaaacatgcatactcctcttcctgtaaacactccagtcatactggcttacagcccactctgaggacctgactttaacttgattccctctgcaaatattccatcttcaaataaagtcacattcttagatgttggcagttaagacttcaacgtcttaacgttgaatttgcggggacaatttaacacatcacactgggtgcctaccatgagccaggcatgagcttatataccattatccactggagcctcaatgcaacctacatactgggtacttttattctccctattttacagagcaggaaactgaggctgaaaaatcttaagaactgtagtaaaagtttcacagctggagttgctgtatagcaggatttagatgtaggctcctgctggctaattgacatagtgtaaaaagaagggaacttggttatgggttagacataaaggagaaatttttttaaaaaaactaaaatcaccaaagactctagacttcatttctggaaaaatggtgatgtcagtcttcctgcttaatatttcagtggccccctattccctgcaggttaagatgtaaattatttagcaggaaagtcaaggctgctgatggtcttagatgcctcattaattctgtctctagcttctctcttcctggcccctttggtccagcaacactgggcaatttatttgcagtctccaccttagagagatggagagggagaaggcttggagagaacagaggatgatggggaggaacaacctgtgcactgggtctcatccttgttgtttgcaattctggctacttttagcagtgagcagtataattacagtttagtcacctaacctctctgattctctctcttcccagcctggccaacatgatgaaaccccatcttcactaaaaatacaaaattatctgggcatggtggtacgtgcttgtaatcccagctactccggagggtgaggcaggagaatcacctgaacttaggaggcagggaggttgcagtgagctgagatcgcaccactgcactgcagcctcggtggcagagttaaactctgaaaataaataaatataaataaataaataagatcatgtttgcagagtcctcagtgcagtgtctagcacttggcaggtacccattggctgtatggataacaaccattcagtttgggatatttggagtctgacataaccaacggcaaccaaagagacgagttccttaccaagccagaaacgcaagaccaggatgcaagtggcattcctggggggtatcaattctctgtttctttgccccttttcagaggctttatgttcacccccaggagtgaacaaccatcttcctgctctgttcctattttccattatacttaccaggagttatgaattgaatcaggatgtcttaggcggcttcccctcctgctttagcaatcaataaattgccatttctaaaggtgagattgtgaattgttaagtccaatctgcagatattctagataacccatatgtctcctgacattgctgtattcatagatggcttctcaaaccattattaatgatgtaattagtatgaatggctacagtatatatcaagcagatcattaaggcagaggtggggaggtagccatttatattaaagatacgtttaatgttctgaacctaagcaatagaaagaaagtacttagcttagaaatctcgctttgctacactatgggttttcttttttaaagttgtcctagaccttctttttgcttgcttaatgctactttttgttggagcccctgggaatttgaatgagttaataaggcagatctgtttgtaaaagagtataatcaagtaaatcacagcctttaaaatcacagatttcaaaatccaatcaacttaattaatgtgttggttcatagacattgtacaagattttatttgattgcactagccgctttctcttagacacccatctgcaagaatatttacttataacttgttgtgtaaagggatcttcctaaacggcacactgccatatgtaactgctcagcttacctttaagagaaaatattgaagtaacaccctcaagctgttctactctgtgttcagaacttttcaaagctagatttctatctttgtagtaagtattgaaaccttgcctcccacatccaggctgttcaaatatgagataaaatagtttctaagaatgatagagtccaaaagttttctacagttcttatagatgttgtgagctgaaaatacatgggttagtgaagaggtttttttttttcttttctctattattatctcttttttccccctaggaattaatgtcctttgtagtagccaaaatgttaaatgtttttaataaaagctgagacttaagttagaggggaacatctttaccccaggtacaaatgacgttgctacttgccacggtccaaagcgcagaggagatggggagattgtgaaaactggggagtcacacacaaggagggggtgttttttgttcttctgacaaactgatcctgttaagcatccactgcagagcggtggctgctgtgttatgcaagcacctgcgatgcgctgcagaagaagagaggcatctgatgctcgaccgagcagagctactgcagacagaagctgcttccgaggccccttctgctcacagggcatgcttcctggctcatgtgcagtcagccatgctgcagaggccagggacccagggagcgtggcaataagtatgtgtccagctttccaaactctgggtactgtgaagcaactgcagctctgagccttgcttaaccagggctggggacctggcagcttcttccaaagtcacttgacaacagttgctctgccctcagtcaatgcaagcaaccacttgtctacaaaaggagtgaggacagtaaagtctctgccttcaaggatcgtactgtattcttattattagtggctacaaactgttaagtacctaccatttgcaaggaactgtgttgatgacatgttacatgtacatcatctgttacattatcataagacctcaaatatgttttattacccccattttgaagagattaaaaaacaaaaaaaactaaattggccaggtgtggtggctcacacctgtaatcccagcactaggggaggctgaggtggtggatcacttgaggccaggggttccagaccagcttgggcaacatgacgaaaccccatctgtactaaaaatacaaaaattagctaggtgtgatggcacatacctgcagtcccagctacttgggaggctgaggcaggagaatctcttgaactcaggaggtggaggtggcagtcagcccagagtgctccactgcactccagcctgcatggcagagcaaggctctctttcaaacaaacaaacaaaacaaaaaaaccctgcaaatattaagtgttaaatcgtaaaactgagaccgcaacccagatctatcttattctaaagctttggttgttttcatttcaataattactgtcatgttttagaaaagcagcaaaacgtttatttaatatgaaatctcctgcagaaactgatacagagacagatcaaaccaggactgctctgactgaaacggaaggaggaaagtctcaagctctgactggaccgcctcctccttccctaattcccaggtagtaattcccaatgactgagccatcacttcagaaaactagaactgtggtttttcagatgtggtctccagtccagcagcgtcagcatcacctggaaacttgctacagacgcgtgttctctatcctcgctgcaggcaaactgagtcagaagctctagggtttgggtgtctctgatttaaacaagccttcggggggttgccgaagcatgctcatgagtcaaaaccaagaatttacaaaacccattttaataacagctgagttctatagtacctttcagtattcgtaacagtgattcctggagactttcttgacaaagtccaggatggtgcattaaatctacttctgcattttatttttttattttttttattttttttgaaatggagtcttgctctgtcatccaggctggagtgtaatggcacagtctcggctcactgccacctctgcctcctgagttcaagtgattatcctgccttagcctccctagtagctgggattacaggcccctgccaccacactcagctaatttttctatctttagtagagactgggtttcaccaggttggacaggctggtctcgaactcatgcctcaggtgattcacctgccttggcctcccaaaatgctgggattacgggcatgaatcactgcacccggccttagtcatgcaatttttattttagagaaattctagaaatggatactgtttactcaatgcagcattggagaatgaacgttgactttattaacccaataataaaataaaatgatttctcttgatttgtttgctgtcaagaatcacaaaccacatggacttgagaaaagtgaaagttattaacgagatttcatgcatcaaggatactgttgactgtccagtgaaagtattttttttttcttttttttttttttgagacggagtctcgctctgtcaccaggctggagtgcagtgacgtgatctcggctcactgcatcctccgcccccagggttcaagtgactctcctgcctcagcctcctgagtagctgggattacaggcgtgtgctaccacgcttagctaatttttgtatttttagtagagacgaggtctcaccatgttggccaggatagtctcgatctcttgacctcacgtgatctgcccacctcgacctcccaaagtgctgggattactggcgtgagtcactgcgcccggcccagtgaagcaccttacgtgtgtgtcaccattgagaagaaaggttaccaaataaattttgtcccgctattgattgcaaaggcattccaatttccaagatatgaaaatgtaggcccagcgcggtggctcacacctgtaatcccagcactttgagaggccaaggcaggtagatcacctgagttcaggagtttgagactagcctggtctacatggtgaaaccatgtctctactaaaaatagaaaaaaattagctgggcgtggtggtgctcacctgtaatcctagctgctcaggaggctgaggcacaagaatcgcttgaacccagcaggcagaggttgcactaaactgagatcgcaccaccgcactccagcgtgggcaagcaagtgagactctatctgaaaaaaacaaaaacaaaacaaaacaaaacaaaaaaaaaaccagaaaaaaaaagaatgaaaatgtgaagaaacgtttgctttagaatcagtgaaatatggcaaaaataaaagagatgcttccgaaattttgttgcattaggtcacttagccaatgaggtcaggtgtctgtggaagcaaaaccgtgtctttgtaatcaatttaaaataacacaaaatgaaaaaaaatgctcttgttcatgataattttttccactttctggtttgattatcttccatatactggtgagtctccatacttggttgtattgtccaagttggattttccctgcagcttcaaaatcatcatgtccctcaccaaactcatgaagttcctttacattgttattgttgactctgctgttcttcttgttattgttggtatactctttagcacttcttcctcctctatctctaattctagtacttggaaggagactatagagtagtgattacctgtattttgagaactgtgttatctgcgaagatgtttcaaagtgtggtggggttataaagggctttgatggtgggacaggatggcattgagtaaagtaagttgagaagttgacagttctccctggccttatgggttcattgtgatttcaagaagccgaaaggatatggttgtatcatctgtgggctccatgaaaactaatgatcattttctaaacttcgcatcatgttttctggctttttctatccctggaatcattaatcatgtatattaggtgatttccctatatctgtttatagacacaaaaacacatatacttttttttttcctttcgaattctgccatatcaccatagaggtcttcaggaagttagtaaccctagttttagaagggtttggttgtttttgctgtctttccatagtcatttttttttttttgaggcagagtctcactctgtcacccaggttggagtgccctggtgcaatcttggcttactgcaacctctgcctcccaggttcaagtgattctccagcctcagcctcctgagtagctgggtttacaggcactcgtcaccacacctggctaatttttatatttttagtagaggtggggtttgccatgttggccaggctggtctcgaactccagacttcaagtgatccacccgtcatggcctcccaaagtgctgggattataggtgtgagccaccacgcctgtcccatcctcatcatttttattactgcatcttattctgtttggggtttttgtttgggtgattgatttgaggtgtttgcttgtgtgtctgatttggggaagacgttcccaggtaattagtgtaaaatttttaataagcctcataagctttacaattatttccctggaggacaggttttatttaggatttaagaacagtaggcagtagttgtgacattttgaacattttatttctttacccaaaaaataactaacttttgtaaaaccaatgaaaagaaatgaaaagaaaatgaaggaccacaatgctttatgggtttgtgtttctgacagcttaagtcctgctcttgaaagtagttacacagttggcaatatacaatgaatcactgaagctgtttgaaaactttttcgtttttttgtgaaaatccaaacttggaggagaaagagcttactgatgtcaacacttagaaagcagtgttctctttatatagtcacttactgtcttgggtttcattttcggttcagggggaaattaaattcccttgcaattgcactctctgtctaccgagaaattttatctccacattgtttttacttgctgtttgtcctctgggtaaaatattgtgtccgtagggttagaagtgcattttagaggtcttttggttcatcaggctgttccttgcaggtcagtatttatactatttctgacccagatgtctcctgtattctaagatcctagtaaaaaagctgggggaagggagaccattgtaagtacacagcagccttactttgtgagctcatgccttagttaaaagattaaccgaagaattttatttcaccctattgtgttaccaaacattagatcttattgcttctaactatatttttatgtcctttattcatccctctttatcccctcctccccaaaaaagaattattttagcatctgaattcattctcctgccaagcagatagaaacctttaatcacttacttactgtaggtatgggcagacacagcttttctgtttcttaagcctgtccttccacttagattgcaaataagtcttcagggaattgcatgtgttctcaaatttgattgtattttttcccttatagacacgggttggttagagggatatcacagtggacaagaattccaaaaaacctggcttcaaatctccaatctattactgtaacattcagtagatcccattgttactgaaaatactgagttcattgtgagccacccctgtctttgagcctttccatgaaagtgagtcttctcccaccccattcttgcccccgttagccccatggcttgctttgaccagtgaactgtgagcataggtgatggatgtcactttcaagtggaaaatttacgagtatgcatgtgcctcattttgctctcttttccctctgcagtaaggccagtgatatcttacatatgacggctctgtcaacttggatttccagaaaaaggagaacgtggaacagataactttgagaaatgggcttttagcaagtgggaaaataggcatgtattttgagctgtgtgttgggttcttcgtgactgcagtgttactcaccctgtcttgaatgatgatggttagtatttgcaacatatacatgtcgaattcccgactagtttgtggaggaagggaagagtgccaatccatatccgtaagcccatcctcaatccaccagcttccaccatgtagtccagcacctaatggttgtttaataaattcttgaagagctatattgaaattggtttgtgtaatcttggaatagacccttcagtggtaaaaaccagcatttttccaaaggttgggtgagattttaggagttctataagtttcttttaggtggttcacagacacagcaggaaacaagattgaatcatagggtggagaaagttttcctttttgagttttcttttaacacattgtatagcattcaaaacaaaatttctcatagccacgtatttcagtggttacctgtgataactagaattccaggagaccaatgtgtttatatttgtacagttgcttaccatttatggttaataatagtagtgtcccacttatactagaagttgattttatagattttcttttaaagtaaaatgtgtttagcacaaagagtacaataaaggaaaataaataatataggtggtaaggtgaaaatgtgaaagcctaaaggtatggtatatgattgaagttgggagaaacactgctgtaagccttttggtaccctaaaatattgttatgaaaacctaaggagggtgggcatggtagctcatgcctgtaatcctggcactttgggaggccgaggcaggtggattgcttgaggtcaggagttcaagaccagcctggcctacaaggtgaaaccccgtctctactaaaaatacgaaaattagctgggcgtggtggtgggcacctgtagtcccagccacttggaaggctgaggctggaggatcacttaaacccagatggcagagatttcggtgaactgagatagcaccatggcactccagcctgggcaacagagcgagactccatctcaaaacaaacaaacaaaaccaaacccaaagaatgtttgaatgggttgtgaggatggtaaagtgatagatttaaggaatcattgctttggttatcgtttattgtgttggtgtttgtaacagtctttccttcctatctagggatttatctccatcttgtctgtccccagtttcctgggatttccgtatgaatagcatattccaagtggagaagaaggagagtgcctaaattcactgtcaccttctgatttaagcttttttaacctacgtacccactctctgttctgtgtgaaaagtaactggaaccatttgtgtaggtgaaaatagcacttagcagactcagtagaactctaaataaaagggatgaagtcaggggtatgaagtgagcatgaagtgagaaacttgaacagactcttgcttgcttgtgactgtaagtgttccctagaattcgtgtggagtcacctggttctttgtgtctcagacccttcaacactgtgaacgttttgaggacaggagttacgtctgattccccttcatgttccccgtcccttcacaattgtttgttgacaccaggcgttcttccaatatccatccattcattcattagtgactttcagttaaagcctactcatgtcttccattacaggtgccaatgcatccatttttattatcagtagtggctacaataatatttgtagcagctacaaattatagaatatgaatcatgaatcctgctagcactttataagaacaactgcttgaagcaacttagcaaggtggcagtattatctctaaagaggaaaatgaaacttagagtagttaatctacttgcccatcgatataagatacagacactaaatttgggtctacccagttctgaaaacccagaaacccgtttgccttttctacctaatagtaccttgttgatgaagacacatacacacacacactagagagagagagagagagaggagaggagaggggaagatatatcagctacataaacttcccagtcctgccttatttattagtctgtgatggttagttttttccagtgctccaggcatagcattcctcagcaccattgttccaaatcactgaagctggcagcattcctttccttgcttaatctctgcaagtttcaacaaattgttaatgtaatgttttccttgaacatacttaacatttacttttattcatctgaacgtggaacgcagcactccatgaaggtgcaatctgtcttcaatccaatgtctcatcaaattcctgctgcccaaaatagagcaaaggttgagccagcctaatgtagggttggcatatgataccattatagctacttagtggacagcaaggccagcactgcttttaaaacaatccctgctcattcttttcttccctttctttccagcaagtcggttttctgagaaggagctgtggctggttgtattaacatttgcattttgatcctgcttactgatgcactgcaaaaaagaatcttctgtgttgcctacttagaattttctgttgtagtcgtgtgaagttgccaggtggatgacatagatcccatttcttagtttcctttacagcacgttgactcttacccaagtccccaaaccccctggttggtgattgcagaccctctttgcaccccttcccttggcgattttatgcaaagttaatgccctttggccaagcagaacttccccagagctccttcaattcttcacatttttgacagtaacactttgtaacgaatgtattttagacaagactcttcgaccgtaaagtactggatctctctaaaaataactcatttgaaaagggggttattttaaggagactcagaaaatatcttaaaatatccaaagtctgagaccaggcatggtggctcacacctataattccagcactttaggaggccgaagtgggtggatcccttgaggtcagacgtttgagaccagcctggccaacacggtgaaaccctgattctactaaaaatacaaaaattagctgcgcatggtggcacacacctgtaatctctgctactcaggagcctgaggcagaaggatcacttgaacctgggaaatggaagttgcagtaaggcaagattgcaccactgtactccagcctgggcaacagagcagggctgtctcgaaacaaacaaacaaaaaagcctgagagtgaagtacagtgctatttgtaggggtttgttaggaagcagaagtatcagaaatgcatattctcaaagcctccctgtctccctctctctctctctctctctctctctctctctctctctctctctctctctctattctgcttcagggtgttctgtgcccccctcccctgtctgatttctgtctctgctcatttctcaccactcactctcagtctttgctcctcagctattcttgcgtgtgtggcgctggctcctgctctgcttttgccttgatctagttttacttttaattgcaaaaactacaattacttttcattgcaaacactgcagttacctttgcaccaaccgaatacatgatctttctcttcagaacttgtaaaagactgcccacctcacctgaccctcctagattccattcacaggagctcactgtctgcagaatgaattgccattgaaacagctctttcacctcattttgcaggcagtggagtgagtttacaggaaatggacaagctcacagggaagcagagactgtggagggaacacagcttctcccagaagaacaccgtgggaagtttggtttcttgtcttagattactgggagtcgggaaagaaagcccctagagatcaaactcatataggtcatctaaaaatacacgatcaagtcacaaaagcacaagataaaaagaaggctttctttatccctgtaccatgcctttacagaaactacctcattcatcaaaagatctttcttttaaacctgaactctagtagctgtgcgatagagaggtcccttgtcagtatcaacagctggggctctatgctgagctcagaaagtggagttctgaatcaaaccaagtccatgagccccaaagtaaatttagaccacaaagaatctcctctccagtttttatataaggagaaaaggagaacaaaagccctgttcctccaatagagcattggccagagaagcccagaactgtactttatcaatgtggaaactaaaatatcttttcagtgtaatttgtgatgaattttcatttgcatttatcatgaagaccaaaacacatgtatcatctggtgagaagtattctttcaaggtatctaaaacttataatcactaataaaaatatgcttaatacttcagggccaatggaatgaattgtatggggaatagtttaggttgtctgatagggtcagctgtcacacatagagggagcaagctgacctggagaatgaacatagagagaacatgataattaaccaagtgctatgatgtcttctaatatcccaaagacagtgctatgatgtcttctaatatcccaaagacagctctttatatgggttttcttcctttgcataatactggatcaatagatagatactggatcgattgatagatagacgaacagatacaaacatacatagattatggacagagatagaatgatctataattgctacctatctcttgtctgtctgtctgtcctttttattcaaagtaagcttcacttccatcacttctgcattttctgtcacagatggcattggtcattggtcatttcagcacagtttcataatatgtctctatttccaaggggtggtctgttgtgcgtttgaaatcccccagatagctctgtgttctgtgtgactttgacagtcagtctcatggatgggtgaaatgaagttttctcttttgttccattcagcccaagtggcagcacttctctaattctgtgagaatgccttcccgaatttgtgcctttattatcttttggttggactcctgggaatctgtctcatgtttctgttcacacctgctctccatcccaactagaggtactcccaaagtgtacccccaaaacaagaagtatttctgaaaacacttgccccatttggggttctcagtgcaatttcgtgacagttttaaactgacactttctctcactttataacagcaggctagagaaaaataagaaactgatagcctcgacctcactaaaacattcatgaattaaaattttgtaaaaaggttaccaacagattgtatcagtttagttcatttttttctattatcttaaaaagccattttccctgtgtttgtaattgtattttatcattttaggtagtagtccagaataagacatgttgggtttaattctctgccacagttctcaaatggatgtttcataagtagcatgtggctttctcagctaaaattaaatgtctcactgtctccaaatgttttctatctagaatttgcaacatacacccttccagaactaacagagactctgaaaattaccactaaacaacgtcagtctagttcatccttcttaccagcttcaaatgctggctgtagataaatacatctttaataaataatctaatgacttaaagaaataaagtctggtcctcttttccatagaagttcagttcagagaagcaccaaatcaaaaaagatgatctatattaacaaaatcctctagttttgtgatgttctaggaattaaagaacaagtccaaacctcagagaccaaatgtatatcccaaatgtatatccccagtggttcctgattcccagaatcccctggatagctctaaaaaatatataaaactggttccattcatgatgatttactaaatatggaatggaactaagcagataggagaactaactggtttaccctcttcgtctgcctcagccactagttgttagtaatatatgtgtgtgtgtgtgtgtgtgtgtgtgtgtgtatatatatatatatatatatatatatatatatatatatttattcccctattggataacaagctgtcgattcctctcatgacctctacaaggcagctgcacatgattgatgagaggaaggatctatgttcagaaaatttttttaaaggaggaagtggaggagaagaaaaaaatggagagtcatagatccttgacaatgccaatgttttgtggaaaggaggcaaaagtacctgatggaagaaataaaggaagagtaaaggatactcatgtgattgcacaaaagtggactacatctcaacagtgaggaatgagccctaagacaggttgaaatcccagctctgccacttcccgaatgtgagacttgagcaatttgtttaaacctcttgggatcagtgttaccatgtgtaaaatgaagatcatcatagtactcatcctcttatgtcatctttttgtaaaatgtttttttaattatggtgggtacatagtaggtatatatatatatttgtggggtaccaaagatgttttgatacaggcatgctgtgtgaaataatcaaatcatgaagaatgggatatccattgggttgggaggccgaggtgggcagatcatctgagcttaggagtttgggaccaacctggccaacatggtgaaaccccatctctattaaaactacaaatattagctggcattggtggtgggtgtctgtaatcccagctactcaggaggctgaggcaggagaatcacttgaacctggcaggcgaaggttgtagtgagcagagatcatgccactgcactgtgcagtttgagactgtctcaaaacaaaacataaaacagtttatcctttttggtactaacaatccaagtacactcttttagttatttttaaatataaaattactactgagtatagtaatcaaataatatgtatgtctttttctttctttttttctttaaactcatcaaccatccctactttcccctctttcagccctggtaactatccttctactgtctatgtacatgagttcaattgttttgacttttagatcccactaataagtgagaatatatgatgtctgtttttctgtgcctgggtaatttcagttaacataataatctccagttccatctttgtcattgcaaatgagaggatctcatcctctgctatgtaatctgcggacggtatttcaaacgcacttagaacagtgcttgggcatcatcaacgccatataagtgctgctgtggtcattgtgttagaaaagtgcccggtaaattatgctctatgaatgcgaggtctgtggattgctcccaagagcgtgaagacccacaaatgtacatgagaggtgggagcatttgagatcatagatgagtttataggatagaaagaagattgcaggtaatataaaaatcagtggaagagtggtgagaaatgattagggaatttaggtgacatttttaaaaaaaatgcatttggtgaaagaaagcaaagaaactctgccacaactcagaatgcagctgacaggccgtctaaggaaatgtcgtggctaacagcagcaggggacgcacctgtgcagagctccctgtgcccagacctgagctctccacaccttcctgaatgctggcagcacctgaggaagggagcaatggatggggctatttatatttggcacataagaaaaccattgctgacaaataacttgcccaagctgacacagcggctgtagagtagagatttaaacacaggttgttttccagaaccctacttcataacttctaagatagagtagaaaatatttgcattccccgtctttactaaaaatacaaaaattagcttgtaagcccagctactcaggaggctgaggagggagaatcgcttgaacccaggaggcagaggttgcagtgagccgaggtcgtgccattgcactccagccggggtgacagagcgagactccgtcacacacacacaaaaggaaacatttgcattgactggggcatgtcctgacacagattaaaacgtgatgtggcttcccactgtatttaagaaaatggtcaagtccagaagtccaggttgggtgcagtggctcacgcctgtaatcccaacactttgggagtccaaggcgggcggatcacttgaggtcaggagtttgaccagtctggccaacatggtgaaaccccatctctattaaaacaaaaaaaaattagctgggcttggtggcacgtgtctgtaatcacagccagttgggagcctgaggcaggacagttgcttgaacccgggaggcagaggttgcagtgtgctgagatcatgctgttacactccagccttggatgacagagcgagattccgtctcaaaaaataaaaaaaggctaagtccttaacatggattacagagccctgcagtttctgagcttatcatccatctgtcccttcataccctatatccccaattccctggagctctttctgtgtctcagacacgagctaccctctgtgtctcaccaggtcggatccctgtgttataggtaacttaaggtctgtaactctgctaaactacaggctccacatggacaagagaccaggtcaggtttttccttttcctcggtgtttatataatgcctgatacttggcagttatttcaaagaaatgaggtgaaccgagtaaattccacaccatattcaggaccaatctctattttgccaaatcatgcatcataattgaggtcgtagccaacggcattaagaatgcttacagtccattgtggagtttgcacccatggccgcccctttggcatcaagctctgactccagctgtgatcacctgccatcctcaagctgccatctgacccctgcccctccacgacctctcagagcatagcttccccttggatggaggggggtgaggagagcagtcagaggtgaaggctaaagaatgtggagggtattgagtgcaccccagcccctgacatttcagcttgttatgtggctgtggtagtaagcatttggaatcagctctatcaattatttaagtctcataattcagtccatagtaaagatttattgcaacaaactgaaaaacaaagtacagacgcaaaggaaacagaacatggattctgctgtgttacacggtacataaacttctcatgtccgtgggagtaacataaaaggaagtaggttatttttaaaatactggagtgtttctgaaagagataattcagctctgagtttctgtgtgtgtacatgtgtatatacgtgtgtatgtgtctataatatatgtgtgtatgtgtatgatacatgtgtatgtgtccatatatataatacgtgtatgcacatgcatctgtgtgtatgcatgtgcgtgtctgtataacgtgcatgtgtataatacatgtgtgtatgtgtgtgcatgtgtatgtgtaatatattacacacatgtacacgtgtataatacgtgtgtgcatctcgtatgtgtttgtgcatatgtgtatatgtgtgtatgtgtgtatatgtgtataatacattgtgtatgtgtatgatgtgtgtatgtgtgcatatatataatgcgtgtatgcatgcgcgtctctgtgtgtgtgtataatgtgtgtatgcatgtgtatgtataatacatgtattacacacatgtacacgtgtataatgtgtgtacatctgtgtatacgtgtttatgcatatgtgtatatgtgtgtatggacacacgtgtatgtaacatgtgtatgtgtgtgtataatatgtgtgtgagtgcatatgtgtgtatatgtgtgtgtatgtgtggatgcgtgtccatgtgtatgtttgcgtgcatgtgtgtataacgtgtgcatgtatgtgtgtataatacatatgtgtatgcatgtgtatgtttcagggtttccttgcattccattttctatttagcatcaggcattttcttcttccctaggcattaaggccctcttggctcaaaattttcatgaagcatggatacattacaatttttacatttttagttggttgtttacggccattggttggtctgtcaagagcaccgagtcatctgcttactataccatcttgagtggaaaggaatgagtttatatttagagacacctggatgtagattacaactccatctctcaccatctgtgagattttgagcacagctccagaatgctgtcagccttagttttctcatctttgaaatgggaagaataaacgtccatacctcctcaagcaagtgtcaattggaattatctctacagattttctcgcccatggaggcttcatgcatgatggtttcatcttgtgctgtccctcaacatttacatgaatgaagtacatcatacttacatatttgaagtatggacaccttttcattgcaagaggaaagcaaaagcaggcaggagcatttcgttagtaaataatagtagggccatgtccaggtgtgaagttaacaatgagagagatttttttgcccatgttctgaccataaccatttgaactatgtttagtcttaatagctgggtggccttggacaaggttaatttgcctttctgtgcttctgtttccttatttataacaggaggatgctcatagcatcaacttctagggttgtcgggaggattaaatgagttaatactcataaaatgcttagaacagttcctggcacatgaaacaaaggtttatttgagtttttctttagttattgctggtggtggtggtggtggtattgttcatgttcttatgctgagcctgtgtggtgaattggaatgtatctgtgaataattcacttgctatttaagcacgttcaaacatcccatcataatattcaaagtcaatatgtgtatttctctgtagttcatccacgaatatcctgttccaagttgccatcatctccccctggagctaccacaaaatcctttagggatccttctgtaacctctatccatgctcccatcaaggaaaaagattttgaaacatctaatcatgctaccactatctgctctcccacttaaaactgtttattgatttcccgttgctcttaggatgaaagcaaacacgattgcatggccttggatggtctggccctgcccttctctcaacactcatctgcttctccccttactcattatttcagagcctttttagtcttttccagttttagcaatgtgctgagtgtcacagcagatgctattccctctgcctggaattctacccttcttgacctcgtcccaccaacatcactattcattcttctggtctcagaatctgtattgctttctccatgatgccgttcctatctttcgtctaaactgggatcttctgtctacgtgtaagaccctctcctcttccttcacagcacacaatgccattcctaatattccacttaacatgttatggttgttgagtgtttgtctttgtgtgagctccatgaatgcagggagctacatatgtcttgtgaactgctagatccccagcattttgcacatggtaaatgctaatgaaaacatttgtagaaggtgtgaatgccatttaagatgttcccataacgttcattagaactagaaagacttcctgatatccctcccattcaccgacattatgtataccgggtgctgtgttcacagcttggccactggatacttctcagttgtgcctctcaccctgtattgtaaatttcctatcgacaggctttgtgtttcctgttagactgtctctttcatgtctcccatcctagtgtctaacataggtattcaataaatatatacagaaggaagataagaagaaagagaggaaagatcagacttcattccagtgaggacagaattgcttgttcatctcttctgtctaagcccatccctctccgtgggctcattttagcaacacggcaagtcaacagaagtttcaacctggaaatgtcccacctagcaaggccaggggtgcaaaatcaaagtgaacaggacgttcctactacctttggggaagacaataacacagagtccaagaggtcaaagggtgcctggcctatgtctgcccctacgactcttccttagcccatgactctcgacctggaatgacagcaagttcatgtctagttaagcaaatccagagaagatttttgtttatgtagtggaatgttcaactcctcaattatgctgtgagaggctgagggggaaaaatagacatttttgcaaaatctgtttctggtaaccttcaacaaactaaaacagttgagcatacagaattttctgttgtttctgcagagataatttgttacatggaagctcatttgcttatttgaagtaaatactgcttcagacccagtagagattaacactcatagatgagatggattgagaaggaagagacataatacttcactgttatatttactgtgttaaatataaagtgggaattgatgaaaaatgttctggagttccccatgtgagcctaagtgatgaactggggtttatttgccatctggcttttaagcagggattttttttcatgtcagaaaaatggcaccttcagaaatattgcgttacagacatctgtttatcagaactttgcctgaatgaattattcagaatgtgcttaaggttgcactttacctgacatatggaaatataaagttgcatacttgatgtcggcatatatttgtctacataaaatcaggtgtcttacttgaaaccaggagtgctggaacttggtaggtggtgcttttcgtacctgggatattcattgttctacctcatgtggttcttgatgtcttcattttttggaaatcattgtgtggaattacatgtaactcacagtttctgtattgaagccccgtttttgtttccactgtgttccttacaactgaaatggaaagctactcttacttgatatgggtttcatggcaaaactctgttagtaatttcaagttggtgaaacaagtgaatatctggagctatcaagaggaaagtcttccaggccatactcagaagacccaagaggaaaaggtggttttgccaggtgcaaaaccatgcttgtaatcctagcactttgagaggcagggtggggagaatcacttgagggcaggagttcaagaccagcctaaccaacatggtaatgccctgtcactactaaaaatacaaaaattggccaagtatggtggcacacacctgtaatcccagctattcaggaggctcagaaaggagaattgcttgaacccaggaggcagaggctgtagtgagctgagattgtgccactgcactccggtcagggtgacaagtcaagactccatgtagagaacaggaagaagtggtttccatacacatcaagttttaaaggaacccttcaactcatcatgtcatcagaaccaaataaagctttaacattatccatgattgtacactgttttccatctgttcatttatttatttatagattgtttcatcagacattgactaagctcctactttaggccaagtattgaagatgtagattctactctttacttgttcggggcttacaagggagcagagaagatggacataaacaaaatagttacacatcagtcaccatgattgatgtgtaacttcaaatgagatgactgctcctgtgaagtgaaacaaggttttgtgagcatctgttggagcaacctgactcaggacttcaagggaaacttcttggaggacgcgattctgaagccatcataagtgacttcacttgttgaagaaggggaggagcctttcagatggcaggacagccatatacaaagatctgggggctagagagctcatgcagcattgcacaagctatttagaggccattgtagctgccgccaggggagctcatatggccaggagggctgaccgttcctagagaggtcagcagcccttacagcctggagtaaggaaggcggtgcttataaagcaagaatgatgggaaaccattgcacagattctaacatagaggccagttctgcgctccaattaaaattgacgaaagatccgtgaagtctgccatcattgcttatctgtctttgaattctctagtgtctagtgttcagcaagtgctggtaaaataaatacatgatgtgggggaagcacttcaataggatgtgagctcggagtgagttccagaaaggtgccccgcaatcacttatcccagaaactggtggggaggtttcagtcaacctgtataaatgctcctggggactgtcctttggataagcaggtgttctctttacctaaaaagagatgcctttcagaaagtctttaagggcagcagagcaagcactgggagggactaataggacctcaaaagaaagaggtgagaggcagagggctgagggcctttcggagctgccgctgcttagccagaggagggaagcaattgcatccccaacaggcgggctgtaaagggaatgcacgtcattacttggaaagggtggtgaagctgggagcaaacagcttctagatcaagctgccagggaggatgtttagtaattaaaggaggctggcaccatttggaggtacaaatctgcaaatccaaggttcacatcccagggagtgaccacgtggtcacaaaacacagcctacaaatgcccccacctgaggtcatacagagataagctacccccatgggggctgtgcgggtacagcaagtcggatgctcttattcaccacccctatacctaatagtgcagttcgttctcagatcatttttaaaggagaaatgaaagctctgtgtctgtgtgtgtatgtaaacaccatcttaacacattgcatgcacttttgatgcacatgtgtgttctaaactgtcatttgcagggacttctgttgttgaacctgttctctgtgaggcacgagtggtaggcttatgaaacccatccatctttaggccaggtgggctggctcatgcctgtaatcccagcaccttggaaggcccaggtgggaggataagttgaggtcaggagtttgagaccagtctggccaacatggtgaatcctcctgtccactgaaagtacaaaaatgagctaggtgtggtggtgggtgcctgtaatcccagctactcgggaggccgaggcaggaga[132 bp omitted]aaattcatacatcttgtacctgaggactgtttggggaagcagctgctttttcccgtcagtttctccttggttttctctactcacagggaccctcgccttgcacctgctgggaaggccagttcacctgcccgggctacttgtgttacacaaagctggaggagaatgaagtcaaagtggctgattttgttagagaagaattgttttgttctgcgttgggtgaagtttctctctattacacttttctacaaattcccctgttcccaattccctcagacaacaaaactacaatttgctgggtaaacaaaagcagtggggatgaagcctccctggcagccagtctgtcagaggtgctgtgcttgttagcatggtaaaagagttagaggaatttttcaagttgtacaaaattgaattacttaataaacttcgtttaactttcttccctgggagtcagtgttgttaaaaaatccaaaaagactgttttgcagcattagcattttacagttggtcagggttttcaaatcctttattctttatccattttttttctcaataacacttgttccttagccctttcttcctagctaacagtctctgtaactgtttaaaaaaaaaattaaaaaaaagaatggctggcctcagtaggtcattcctgtaatcctagaactttgggaggcagaggcaggtggatcccctgaggttgggagttcgagactcccaggccaacaaggcaaaaccccacctctactaaaaatacaaaaattaactgagcatggtggcacactcctataatcccagctacttgggagtctgaggcaggagaatggcttgaacccgggaggcataggttgcagtgagccaagctgatgccactgcactctagcctaggggacagagttagactccatctcaaaaaaaaaaaaaagtgtagatgtttggttaccccttcaaatcatctagctagtaggttggactttgtgtttattccaattttccccgtttagcaacattgcccccaccatcaccaccaaaaggggaaaaaaagacagtgggttaatcatccctgttagaaagaatttctctccaatgcctgaggcaagtttgcatgccatggatggaaatggtattttcaagagacagactgagccggtcctgcctaggaaacctgctgccttggcacggtggtattagtggctgagggctgtatgtttattccctggccctctgctgatccctggaagcaaagtgagtgtccacaggctttctctgtagtgacattgacttccttctgcccttgtgtttccaaggtgagctttgttaggtgccaggctgcagggtccttctgcagcattctgaagaaatcctctgccttcctctggttgggcagaatgcccagtagaatcaggaacagtgagctcatctccacctgatactttgtcttcgatggaacgctttgctttatcattaaaaaaaaattataatgcctcacttagggctgcaaacagtgttgatgtattcaatagcgcattagagaaaacgtcgaagcagatttgtagaaggtgcccatcctatgggcaaccccaaaaagcaatttattacccccccccaaaatatacattgtcatgtggagcggaaggattaaatatttatgtctgttggctggggtaataaaattgtattcaattgtgtctcaggcactacctaatgattgttgaaaactcggtaataacaccgaaactcataaaaaatacaggataaacaatgctggaagaaaattatgggaaaatagcctctggcctgtggaaatgcgactttattttgaaataatttgaaataagagtgtatgcattaaaaaaaagtgagtttatataaccgcaatctaatctctagaaacttttctttatggttttgttctttgtcaagttaaaaacaaggggtacatcagtagtgtttccagtaaatcctgataggtttggatttccttgaggacaggaacagcgttttcttcatctctgaactcttgggacttaaaaagagcctagttcagagcagactgggtgctccataaatatttgcagaactattttttttttttttttgagacagagtcttgctctgttgctgaggctggagtacagtggtgaaatttcagctcactgcaacctctacctcctgggttcaagcaattctcctgcctcagcctcctgagtagctgagattacaggcacctgccaccccacctggttaattttttgtatttttagtagagatggggtttcaccatgttggccaggctggtcttgaactcctgaccttaagtgatcagcccacctcagcttcccaaagtgctaggattacaggcatgagccaccgcacccagcttgcagaactaaatttaaaacataataattgtttatgatctccatgtcatctccgtattccaaggattctcaaccagagtgatttttgttccccagtaggcatttcacaatatctgtagacatttctgtgttttacaacttggcaggggagtatgtcctcctggcatctgtagggcaggggccagggatgttgttaaatatcctacagtgcgcaggatggcccccgaagcaaagcgtttgtagtgctgacagtgagagtcatctttaccgatgtgcctccttcagtattcccagtgcccagagcttcactcagagaaacagtgtatcgagctgtccttgagagaatggcggtatccatgtattggttttctagggcttctttaagaaagaactaaagacttggtggtttcaataacaggaattgatcgtcttgtgttctgaaggctagaagtgtgagatcaagatgccagcaggggtggttccttctgaaaactgggagagagaatcggtcctatgcctctctcttagcttctgtttttgtttgtatgtttgtttgtttctgtttttgatggagtctcactctggttgcccaggctggattgcagtggcacgatcttggctcactgcagcctctgcctcctgggttcaagcaattctcctggctcagcctcctgagtagctgggattacaggcatgcaccaccatgcttggcttatttttttgcattttttagtagagatagggtttcaccattttggccaggctggtctcaaactcctgacctcaggtgaaccacccgcctcggcctcccaaagtgctgggattacaggcatgagcccccatgcccggccagcttctgtggttggctggcagtcatgggtgctccttgcttgtagatatgtcacctgaatctccacctgcatgtttacatagagttctccccgtgagcatggatgtctctgtgtctctattttcccttttagtgaggacatggtcatattggattagggcctatccaaatcatctttacttgatcttctgcagagaccccatttccaataaggtcacattcacagctactgggggttaggacatccacatgttttggagggaaacaattcagctcctaacaatctacttctctgcatccctacatccgtgcagttcagattattacctctgctcagcattgtgttgcctgagatctggcatttcatcttctctcctccagcctttcgggtgtcctctcctgcggctctgggcaggcctgcacccccagcctctgaccatggcttgggcctgtcttgttcatccaagttactctgcctttgcacccttctaaccccgatgtgtgtctgtctgcctgccttctctttcctcccaggaacctttgacttttccactgatacctctggcctctggtgtgacctcttctagactttctccccagcatgcccaatcctctaggaaggtatttccgggttatagctgacaactcacttatcaggttcacctcccaaactacttttcagagtgccaagcatgtcttatccatgtgcctggcacagtgctgaacccccgtgatttaggtggaaatggttaatgaatcctatcctatttcttccagaatatggccctctaattatccatgcagggtccagttgggatgacgagggcaggctccagggtcagaatgccttgtcctcaatccttgttcacctcattgactcactgtgcaatctgggaccaagtgcttactgtctctctgcccagttacctcattgataaatggaggtgaggttgtgccagcctcacaaggctattgtggggactaaattagtttatataataattttgaacaatgctaggcacatcctaagcattcatgactgcagctgctaggataatttggcataatctgtgcttccccccaacacgctctctctgggggctccgttcttctgcttctgaacatgcttagacttccatttctgtaggaggttcttattgttgctataactaaatgatcaccaatttaggtgtaatttaaaacaacacaaatgtattttcttgcagttctggaggtcagaagtccaaaatgggtcttgctggagtaaaatcaaacgtcaacagtgttgcatttcttctggaggttctttgggagaatgtagtttcctccctttgccggtttctagaggccacccagattacatggctcatggcccttttcatcttcaaagccagcattgtggccttcagactccagccctggcttccagcatcacatacctccttctctggtcttcctcttgtaaggaactttgtgattactttgggtccacctggataatcctggcaactcttccatttcaagatcctttattacatctgccaaggttcttttgccaggcaaggtgacgtattcacacctttcagagattacgatgcaggcatctttggcatgagacaagattctgtctatcacactctctaaaggcgttccacctgtgtgatggctttatctccagcaaacatgcattcatattcaggctcagctacctagaagcgagggacatgtaatctccccaagcctgttctctcttttacaaaatcagacaaagaaattatcaagtgaggatagagaagtcggaatcctatgtgcctaacacgtggtacatgcatgctaagtcgtggcagtcacaatgactgttgttggtttcactttttttggtgttattttctcccgagtgtggttcttcccttattacctgcagccatcggtcttctgttgatctaaagcaaggtgtgcagttgggggtgtctgctcggaccaccctcgtgtgactgaatttgcctgcatatcggttcctttgctaattctgttcgggcaggatttgcttttttttgcttagcaaacttcatgagccatttctgatttccaatattgctcctcaggcagatctctcttgaaaggtgttgtttgtttggtttgtttacctcttgttcattactcttacctctacaggctacaagtctcctaggaagggatattgtgcctgtacgtcccaccctggaccacggaaaaccttggtagcgtgcaaagagattgggcattctagcggggctttgatggaactctaggaagtagaaaaagcagactcaagcagaaaatgggaaaagagaaatcctaagaggagtctcatgagatgattacttcacatttgcagttcaggcattttctccatacttccagaatcgtgtagggagttgggcacagagaatctttttaggggcaaagaaagtgagtgtcttttccactccccgtctccacacccatcttcctatttcccttccacacacacaaagaggagagctttaactttatctcaggaattctgtccccaggttcaatgctggagtaaaatcaaggacttggctctgtgcctgagtgggtgattccccacttgtgttaatcactcaaacaacctacatgcttttccttgtagttctggaggtcagaagtccaaaacggcccctattggggtaaaatcaaagcctcagcagggctgcatttcttccggaggttttatgggagaaggcagtttcccatctttgtcagtttctagaggccacctggattacgaggctcgtggcccttctcagcttcaaagccagcagtgtgactctaaagcaacatcatttcctaaagtagcggagaggaggcctgggaagattacacagcaaaaccatcagatcctacgtctgagaatgagaaggttgtttccttttcagttgactggtatatctaagcttatatccagaagaatgcctccatttcatgctggtctttatacctttgccttccttgctaatctctgttagtaaagaggaaggagggtcaggtgcagaggctcacacctgtaatcccagcactttgggaggccgagacaggcggatcacttgaggtcaggagtttgagataagcctggtcaacgtggtgaaaccccgtctctaccaaaaatacaaaaattagccgagcgtggtggcaggcacctgtaatcccagctactcgggaggctgaggcaggacaatcgctggaacctgggaagtggaagttggagtgagccgataatcgcaccattgcactccaacctgggcaacaagagtaaaattgtgtctcaaaaaaaaaaaaaaaagcaaactgaagacttgaaccttgggtagtgcgttagtttcccaggactgctataacaaagttccacaaactaggaggcttcggcaacagaaatgttttgccttacacttgtggaggccagaagtccaagatcaaggtgtcaggagggttggtttcttctaagggctgggaggaggaatctgttccatgcccctccctgtggttgctggcaacgcatggtgctgcttgggttttaactctgtcagtgtgatctctgccttcacctgcatgtgttctccccataagcatgtctgtctccctgtccaaatttcccctttttatgatgacatcagtcatattgaactatgacccataatgacttaattttgttacctctgtaaagaccctgcttccaaatcacgtctcacagatcctaaggggttgggcttcaacatcttttggtgggaacaaagttcaatccatagcagacaggcaattctttttacctgctatttaataacacttttatttgtattgtgtttattttaccatgcatacctacagcaaataattttgtttccacttatagaagagatctattttttcttctttttcagtaaatgaatttactttttaaaaatctcagtaaagtgattttaagaaaagacgttaactatatcatagtacaggtggtcttcagatgtggccaaatatagaagacacagtgtaagatttgggcaatacttggttcaccaatcctttgaggcttgggagtagaaagaacaagaataaagatgttaagtagagtaagatgcattcttcaaagattcctttttgtggaccatttctttgagagagaagttttcttcctgtgaataaatatgctgttgctttttttagctctatcatttatacttactagtatttcagaactttacgtttgagttctattttcatgccataaagaatgaggtaaataatctgaaacttaaattcccacgtggagtaatttctctaatgtggagtttctcaaacttgagggtacgtcagaagcacctgctggcattgttaaaatgaaggttgctgtgctcagccccagattttctgactgaatagctctggggtggagctctgtaatttacacttctagcaagttcccaggtgatgtggatctcggagtggggacggtacattttgcgaaccacggggctactgaaatgaggtgtctgttctctgtgagtaaagatttttcaggatcctttccagccctgcggctcagatagatcagattgaagtattctgggtgggctaagataactaaactaaagaccttctgagatttaggtttaaattcttttctctttgtttcttttactttttctttcttgctttcttgctttcttttcttgtgtgtgtgtgttattactattttttttttttgcaaggtctcactgtgtcatccaggctggagtacagtggcatgatcatagctcactgtagcgccccaacctcctgggctcaagcaagcctactacctcagcctactgagtagctgggactataggcacatgccaccacacgtgcccgcctaatttttttttttaagacagactttgtcccactgtgttgcccaggctagactcaaactcctgagctcaagtgatcctcttgccttgacctcccaaagtgctgggattacaggcatgagccaccaagcccagcctagagctccttgtttttggtcctcaggggatcttgggcaatatctcacctcatctggctgttacccaacactgtgctttatattctacttcctatttctgctgggtgaggatgggcttctgatgggtggaaaagaacttggaaagggccccaggcaggaaaaccattatggaagcaacgtctgtccacccaccaggccgctgggaggctgaagaagacacgtttttttgttttgttttgtttttttgtttttcctgtgggttacttgaaaaacatttttttaaatgcaaaaacagggtatcggaaattattatctgtccacctatttaactgttataaagtagcacttttaattcatttccataattacagcctgtgtcatgctgttcaaaagattcaactggggataaggagaatggtcccattttaacccccttatgagcgtgttagctcaggccaagagcagctgctgtctcttccggcaagccacggcattgtttgagaacatctttcctctcatatcccccaccagaccctgagcatgttgccatcggccttcttcacacccccacaaccctcggccccatcatctgcagtgcccgatgcccagcactgagcccagtgcctggtgttcagggtgtcttttgaaggagaagttataagtcggtagcatccccaagcttttcccagagcaactcaagccctgaggccaccagattgtttgggcagcaagttggtctcctagaagcccttggtagacctggctccttgcctagctgggccaggctctgtcctcccctgcgtaccctcctagccaagcgtctgggcagccagcggttaagtccactgtgggaagctattgagtctgaaacacacagtgacagcaggcatgctaaactacttcccagccctgcatgtggcgtaattgtattttcagggagggccaatctattagcaaggtgccagtctcaactgtgtaacttttataaagcaaacactaaaggcctcttggggtgaaggatattataattatggatgatttatactccccacctcatgtatacattgcacttgatgagaatgttctacttgacgtagccagaaacattaagcaaaaaatagtgttgcattctgggttagaaacccatcttttgttttatgtctaatctatccagtgctaaaacatttggaatgatacctctgcatgctgctgtgaaggaaatacgaacataatgagtgcatttctgatttcagaccagatcatcatttccttctaaaatacctcactgagtttagcatatttattccttggtggaatgtttgctgtgtattgcagtacgaaagcaaaagaaaataatcattataattataatttccgggctaggagggaccttagtgatatatctagtccggggtgtctgggcttaaattacagggtcggctgataagtattctacttttcatgattcagaatctacaagttaaaagaggaagagagaagagaaaagacagtagtaaaggaggtacttttgcattaataagaacacagacctaggtgtctcacctccacctcctacctgagccacctttgataagtgagaatctctctggacatcagttttcagctccagaagaaaacaaaaataaaaaaaaaaacccaaaacagggatcaaggccaggagcagtggctcacgcctctaatcgcagcactttgggaggctgaggcaggaggattgcttgaggccacgagttcaagatcagcctggccaacatagcaagatcccatctgtaccaataagctgaaaattaacctggcatggtggtgtgcacctgtagtcccagctactttgaaggctgaagcaaggaggcagaaacaacaagatcgctgaagcccaggagttcaaggctgcactgagccaagatcgcaacattgtgttccaagctgggcaacagagcaagaccctctcaaaaacaaaacacagatggataggtttgagacagccctcactcacataacttttagagaagtaaatcggatagtgcctgcgtactattattattacagcactattgccaggcagcaagcaggcccagggtggtgtaagtcggctttgctcatccgtagatgaaggatgcagaacattcctcagttgactaatgtgtgaactgcacactgagaactggcctgcggtcctccagctaatcagtggcggagccatgctctccagactcggggtcaaggcactggggctgagctgctgctttccccaggctcccggagacccactcccttgttctcctagcagctggatgaagcctgtggtcctcagcatttctactaattccctccaagaagggcctgggattgtttccattctctgtgttgcggactagggagctaactgcggttcctttctgcagggaggaagcttgctctacagattagaaaggaaacacgcagcttcccaagcatgtcacttctgaactgtttaataaatccacgtagcccgttttcttatttccttgataacttttcaaaaattattccttaaacaaatgacttcctactatagcctaaatctaaaatctaaacaataactattttttctaagtcctcacccccacaccccccttttttttttttttttttgacacagtgtcttgctctgtcacccaggctggagtgcagtgccatgatctcaggtcactgcaacctctgcctctcgggttcaagtgatcctcctgcctcagccttcagagtagctgtgagtacaggtgcgcaccaccatgcctgactaaatttttctactttttgtagagacagggttttgccatgttgcccatgctgccctcaagcacctgtactcaggtgatctgcctgccctggcctcgcaaagtcctgtaattagaggtgtgagccgctatgcccagccttcattcctttttatagttgaataattctcctgaagtggacatgttccgtgaaagggccgtatttgcaaagtggtccccaaatgctgaagttgctgagaaaccaaagtacaaggcagaaaaatccagtttgacattaaaagctgttttactgggaaaacttaaagacagctgtcttgactggcaggaagacagagctccacactgctactccccagacccagggcttatataccttagggaaagggcataagcgctgtgtacaagacaactgaaggcaaccctccaggagaggcaagaatgatcaaagttgacacgttgttatgctaaggactggaaataaagtaggaatcaggaggcattcacggagctgggactgatcagaagtcaatatggcagattagcatccaagatggagtcactgttgtttccacaggataccatagtttgttcatccgttgatggacagttgggttgtttttacctttttgctattatggctaatgctgctttggacctctgtgcatggggtttggatgtaggttttcatttctcttgaatatatccctaggtgtggaattgctgggtaatgtggtctaatacacctttggttaacgaaataaatagcattttagttgtttttttttttttaattgtcattctacgaccatctccaggaccattagtggcacagataccacagtttaagaaatcccataaatcatcgtgacctacacacttgtaaggccttccatcttgcaacgctattggccgttctggcttgtgtttttctggatggtcatcacgaccttcccaggtcgtccttttacctctcattggccgcagttatgcccattcctacttaaaaactcttgcataagctcggattacttccagcttttttctaccacccacttaaacttttcccatctttgaaggctgagttcaaacttcgaagtttgaatttgtaccttgatcttgtttttttatttgtttgtttttgtttttttgtgtgtataagatggagtctctctctgttgcccaggctagagtgcagtgacataatctcggctcactgcaacctccaccttccaggttcaagcggttttcctgcctcagcctcccaagtaggtaggattacacatgcatgccatcacatcaggctaattttgtatttttagtagagatgggtttcaccatgttgttggacaggctagtcctgaactcatgatctgaggttatccacctgccttggcctcccagagtgctggggttacaggtgtgagccactgtacccagcctgcaaatgattttgtccacagagcagactgagtttctgttcttaatttgtatttaaaatagaaaatctcagtggccaccttggtccccgctctcactgcaaagagtctgtcccagctactgttagggactcatttgtaaccaaacactgaacagaggatgtcacagttagtgactaatcccatctggtgaaatcagtatatgggattgcacatgaaatgaagagtttctgaacttgagtgtagctctatatcttataaagaaatctacaagtgcttttgtccttgatgtgtttcatttggggaatacatccatttctgtctccgccttctttaaacctgaaaggaagagagttggtagaaacactctgtccaaaggaagatcaatgctaacaatgttcatttttctaagtgtctccttcttctgaaataaaagttaggaagctctgacaccggctcccttcctgccttctacaccgaagtgggagttaagatgttccagataccatttgctgttttgaaggagggtctgtgtgctgtgtgatgagtagactcttcccctttgcttcgatgggaacctcggcattccaagtggacatatttcatatcctcagggcttgttctcctcctctgtggatctcagtagcagaccttcagctgcctcttagagaacagggccctgggggagacatcatcctttgtcagaaatcctggaaaaataccaagaaactgacacaagtcgaaagagggacaatggagacctgggtattatccctttagggtgttcttactcaacctaagtctcagggtagcctacaggagagccacttacgaatttgttaaaaatgtacatttgtggccaggtacattagctcacgcctgtaatcccagcactttgggaggtcgaggcgggtggatcgcttgaggtcaggagttcgagaccagcctggacaacatggtgaaacccctgtctctactaaaaatgcagaaattagctgggtatgctagcctgtagtcccagctactagagaagctgaggcaggagaatcacttgaacctgggaggtggaggttgcagtgagctgagattgtaccattgcaatccagcctgggtgacagagcaagactccatctcaaaaaaaaaaaaaaaggaaacacacatttggggactccaccccaggcctaccgaatcagaccactgggcttggtgccattgtttatgaatttttaacaagctacccgggtgattctggggcccactaatatttttgaactgtagctataggaagacttcatacatgcagagtaaaaccatcttaaatccaatcaaattaattgttaattaaattaatgtctgcctgggccctaattcataactttcatgttgcaattccctcctgatatccagaggcatcatttaaagaataagtaaccagggacataaaaatgaattatttatcttacccaaatctcatacccttctcagtgaaaatgtggttgcttgtcactgagtgtcctacccaatgggcatatctctggtcgtttcagagaaagaaatcattctctgccttccgaatgcagacaacatgaagcggcagtctcacgttgatattatggttaattaatcttgggcataggagtatgcaggagcattgagcagaagcgcactcgttaataaacaagtattttcagtgcaacacattgcaggcttggcccttacctgatgtaacagatggaggagaaagtgggggtggggaggaaagtggctgtgatctagttacgcagggtcctatttcaaacaccatttctccatttaataacaacagctaatgatttttgtttgtttgtttttgaggcagagtgttgctcattcatccaggctggagtgcacaggtaggatctcagctcactgcaacctccgttcttgggtttaagccattctcctgtctcagcctactgagtagctgggattacaggcacctgccatcgtgcctggctagttttttgtattgtttttttggagatggggtttcaccatgttggccaggctggtcttgaactcctgacctcaggtgatccgcccgcctcagcttcccaaagtgctgggctgggattacaggtgtgagccatggcgcctggcccaagaggtaatgtttcttgaccaattcctatttatcctgtttacatgtattaatttctccaaattaattcctcacaacagcccagcagtttaggttctcttattagctccattttatagaccaaaaaataaaataaagctcccccaaactggaacatagagggtttttttttttaagtaaacttctcagcatcacacactaataaagagtagacctgggatttgaaccatgaaatcccaagagagatccagaacctactctcttagacatttctccacttcctatggcttgaaatttgttttaaaggaaaccctggtatcttcgaacaagtatctggaaattccgtcctttttgttgatggagagataaaaatccagattgaatccagatccataagacattgtcatcagcactgatatattgtatgttatagataaggagaaaaatttccaggaggctgagtgacctggctaagatcattctttttttttttttttttcattattattatttcaatagttctgggagaacaagtggtttttgttaaatggttaagttgctgagtggtgatttctgagattttggtgcacccatcacctgagcagtgtacactgtacccagtgtgtcatcttttatcctttaccccctcccacttttcccctctgagtccccaaagtccattacatcattcttgcccctttgcatcctcaaagcttagctctcccttataagacggaaaatatgatatttgtttttccgttcctgagttacttcacttagaataatggcatccaactccatccaagttgctgcataggccattattttgttccattttatggctgagtcatattctatggtgtaggtgtattttctttatccactcattggttgatgggcattgagtttggttccttatttttgcaattgcaaattgtgctgctataaacatgggtatgcacatgtgtttttttatatgacttctttcctttggtagatatccagtagtgggattgctggatcaaacggtagttctgctcttaatgaagttcactcctgatattgtcatgatacaatctctctcttctgcatgaaaccagagtcctttctactgtttctcttgcttcctcagcttataaatggcttgtttaagttgatacgaaaaagttagatgtgtcctagacattaagggagcaccgagtccacagaggctcttgtaattgccaagggctaccataacaaatgaccagctagtggcaggcttgaaacaacagaaatttattccattactgtttggggaattagaagtctgaaatcaagatgtggagatattagctccttctggaagctttgagggagaatacatttcatacctcttccctagtttcttttggttccaagcaatcattggcaccccttggcttgtggctgcatcactccagtctttacttcatctgcagtgggctttccctctgtctctgtgtgtgtcttctcctcctcttaggagaacatccaccctgaatccaggatgattccatcttgagatccttaacttagttacaccacctgcaaaagctttatttccaaatagggtcacattcactgatatcagggattaggacttggacataggtttttgcaggacactatctggctagtctgtaatgactatcagagaatggattctatagttactggataagtttgcccttgtttgactggaacacagtatctcaagtggttgtggtgaagcccacagactatggggctcagcaggtgttggtttgagctcctgcaccattcgttagctttgtgaccattgataagtttcctaaactcccccaggctgccatctcttcatttaggaaatggtgatattcatcttaactaaatgcatgagttttctattctgtgttacaaattacccacacacatttagcaatttaaaacagcacacatttgttttctcacaatgtctatgggttaaaattttgatacaatttagctgtgtcctttgttcatgctctcacatgactccagtgaacctgtcaggtgggttgtgttcacatttggaggctcaaatggggatggatatgcttcgaagatcacccaggttgttggcacaatttatttcctgtgaccgtaagtctgagattggtggattcttgctgactgttggccataaaccatgtttaccttccagaggctgcattcagctttctgaggtcacccatagttccttcctacatggcctttgccataggtcctctcataacatggcagcttgcttcttcaagcagtggagaaagaataatttatgtatatacataaattactgtatatatatatatatatatatttttttttttcttagggttgctttcaatcaatagacagtatggcaggcagaggtgatggaaagttataccgtgataatgttcatatatatgagcatatgtatgtgtgtgtgtatatatatgaagatgtatgttgtatatgcacacacacatgaacataatcaccatgtaactttccatcacttctgctgcattctgttggttggaagcaagtcccaggtctacccataatgaagaggaggagattatgcaagggtgagaacacaggaagtcagggatcattggcagtcaccttagcttctgcacaccactgaaatattgtatgaattagaatatacacagaactagcacaatgcctaacaccttgtggctatttaatgtatataactgctgttaccaactggcagctggtattactattcaggttaatcactgcccagattttagcatctacaactttcttcacacaggctgttccctgtgcaacttcaggagcaccttacacacaggggaggatgtgaaatggatcctggggggtaggtgcaattcagtggttcttgctacaatggagaggtctgaggcattggcatcgatctcagaaagacctgagcatcctacattgatataaactgtaacttattcagatattggaaagcactggttttcagttccgagtgtccggtggtaatggcaagtttcgcatgctgcagccccttgcaagcccactaaagaacatctgccacccggcacagcagtggctgctggtttttgctctctgcagtgagcacttccaggctgtcttgcctcttcctgaatttgtgggtggttgctaatcttttagctcattttctttgctgtgtttttccacatttaaaatcttttattttcctgcgtctgtgttttcatttccaggagacagttggcttttttcgtgtgtgtggaataaatgaacatgtgattcttttacttgctgactgttgaatgtgaaatgtgcagccacctgtaagccaggtgagggtggagtaaacttaggccatgttttgggcctcactgcatccaccactccaaaaactggaaagccttctgagattttaaacattttccagtaatttccttattgtatggtgactgtgagtaataaatcaggaggtcagcgttcatcacaggtgggattgtgtgatgatggtgtcacagagcacatcatagtgagcatttccatttctaggtgtaccttgggaagtcttaaacaagggggtctatatgtctgtatttccttttggccatttttgataatgaccaaccagaacatatccaaatcagatgatgtaaggtgcctttaatacacaaactacttataaatctataggcagtgtataagcaaaccatagacagtgcagtaccgtcggctgtttatacaagagctgttattacccctaagcccagaaggcaatgagagaaagtgatttgtagaattccaaaggagataggaaagcagctggtccagtgtgagtctgagaataaataccctggtccctgctcctggtcttcagttgcctgcctgagctctccatcagcccagccccacaggctgctagatgtggtatcctggccaggtgtggtggctcatgcctataatcccagaactttgggatgccaaggcgggaggatcatgtgaggtcaggagttcaagaccagcctggccaacatggtgaaaccccatctctactaacaatacacaaattagcaggcatggtggggaacacttgtaattccagctacttggaaggctgaggaaggagagttgctggaaaccgggaggtggaggaggcagtgagccaatatcacaacactgcactccagcctggatgatggagaaagactccatctcaaaaataaataaataaaaagatgtggtattctgttaatcatggctgaccattttccagggcagagagcagggtggaatgggatggagagtgaatcagcaggggagcatggaagatgcatcagatatacccacacaccctttactctttaccccttgactgccattttctagcctttaaagcagtagaaggccagcaaagtggtcaggaacacagatatcaaagcttaattaatagttagtctattttggagtccaataaaggatttgccaccttctagccatgaaacttcaggcaagtgactgaacctctttgagtgtattagtccatgctgcattgctataaagaaatacctgaaggtcagttgtggtggctgacacctgtaatcccagcactttggaggctgagtcaggcagatcacctgaagttaggagtttgagaccatcctggccaacatggtgaaaccctgtctctactaaaaatacaaacattagtcaggtatggtggtacgtacctgtagtcccagcttctcgggagactgaggcatgagagtcgcttgaacccggaggtggaggttgcagtgagctgagattgtaccactgcactccagcctgggtgacaggaagactctgtctcaaaaataataataataataataataatagcaataatgccacctgaaactgggtaatttataaagaaaagaggtttatttgactcacagttctgctggctgtgcagttatggctccagcatctgctctgcttctggtgaggcctcagggaggttccactcatcatgggaggcatgttgggcagggaagaggaacacgcaagagagaggggaggaggtgccagcctcctttaaacaaccagatctcgtgtgaactaacagagtgagtgctcactcatcactaaggggatggcaggcaccaagccattcttgaggaagccacccccataactcaaatatttccctccaggcccacctccaacattggggatcacatttcaacatgagatttagagaggacacatatccaaactgtatcaccgagcctccatttcttcacctgcaaaataatgaggtgcaagtacctacctcttgtccttactgtgataaaatatttctacctttattcttttttttttaattttattattattatactttaagttttagggtacatgtgcacaacgtgcaggtttgttacatatttatacatgtgccatgttggtgtgctgcacccattaacttgtcatttagcattaggtatatctcctaatgctatccctcccccctccccctccccctaccccacaacagtccctggtgtgtgatgttccccttcctgtgtccatgtgttctcattgttcaattcctacctatgagtgagaacatgcggtgtttggttttttgcccttgcgatagtttgctgagaatgatggtttccagtttcatccatgtccgtacaaaggacatgaactcatcattttttatggctgcataatattccatggtgtatatgtgccacattttcttaatccagtctatcgttgttggacatctaggttgttggttttttttttttttttttttttttttttttttttttttttttgagatggagttttgctctcttgcctagactggagtgcagtggtatgatctcagctcactgaagcctctgcctcccgggctcaagcaattgtcgtacctcagtctcccaagtagctgggattacaggtgcaaatcaccatgcccatttaacttttgtagagatagggtttcgtcctgttggccaggctggtcttgaactcctgacctcaggcgatctacctgccttggtctccgaacgtgccgggattataggagtgagccactgcacccagcctatcctttttaatgcgactaatggactccacatttatttatttatttatttatttattgtcctatccaccctattccactgtgaatgtaaatttccgggggggcagggattttgatctattttattcactgacatagctctagcattaagactagttggtggcatagaggaggcaatccataaatatttgggggcatcagtaaataagatagtggctacaaagggcttagggtagggcctggaatgcgttaacagcttgatatttgagcaagtatttggtagtaaatacatcaaagttgattttaaacacccaaacacagacaagcaaagaacgggaaatcccccaggtagggatgatatttagaaataggaataaaataagcctggcgaaattacctttggtgagttccttgcaaggttatgtgatttaaaaaaaaaatctgtaattacatttctctatgtaattttgttttatcatctatttatttatttacttttgcaattaatttattttagtaacctaaactcatcgttaagtctgtagtcctggaaaccatgtcaaccgtcagatctctgtctatgctcaaaaacctcaacttgctggctgggcttggtggctcgtgttagtcccagcactttgggaggccgaggtgggttgatcacttgaggtcaggagttcaagaccagcctggccaacatgatgaaaccctgtctctactaaaaatacaaaaaactagctgggcatggtggtgtgcatctgtaatctcagctaatccagaggctgaggcaggagactcccttgaacctgggagggggaggttgcagtgagctgagatcacaccactgcgctacagcctgggcaacagagcaagactccatctcaaagaaaaaacaaaaacaaaaacccttatttggcagtgactgggtacacagagttgtgcaacaggagacccgcctgcagaaagtacccactgggatcctcaccacacagcaggcctcagaatttcccctgcctcctgatcggtgttcagatgtagatagtaggttcagtgggttgattaagttaatgacatttgtagcggtgttataggctgcaggccagggagaggctttctggaaaattgcagggagaaatcctgcaggctctgcctttgaaagataatgctagttgcatgctggggctgtctcctccctttgtcttgaaggtgtagaagacacagctttgcgggctgagtaaacatatgtgcatggttaaggtaaaaatgctacttagctcttcttcccgttaattcgttcaagaactggtgaaagagagcacacttcttggagactgaacttttaaatgcttctgctgggtctcttgagttcttaaaattatcgttttgatctttctgtcccgtgcagatacaaaatacataaacatccacgtgactctttttatttttcacttagaacctgcgcattgtcctagcaggtactccctcagggcctgggttttgttgtcactgctggaatgcagttgctcctccttgccttactcaggcctctgccagcttctcagacagctttgtcaagcaattgctactcaaccagcgattactattaacccttcgttacctaaatccacccaccatttttcttttcctataccgatgggcctcaagcttgagtttgcattagcttcccccagagggtttgatcccctagagacttagagggtccccaccctcagaagttctgaattgttaggtctgggtggggctcagggatttcattttttaacgaaaccctaggtcctgctgaagctgccagttcccatctctactaaaaatagagaaatttgccaggtgtggtgacacacacctgtagtatcagctacttgggaggttgaggcacgagaatcgctggaacccgggaggcagaggttgcagtgagctgagatcgcaccgctccactccagcctgggcaacagagtgagacgctttctcacaaaaaaaaaaaaaaaaaaaaaaaaatccgaacgtctcgtgttaacaggctgatcattattttcaaaaatgtttcctctctttctttccacatggaagctccatgtgagcagatatttctttgttttgttttgttttgtttttcgtttttgcatcattcactgctgtgtcctgtgtgcctggaaaagtacctgacatttagcaggggcttaatagacatctgctgcatgttgaataatagtgaggatgtcagcatcacctgctgccctttgggggagcagattttagggcactgtagcaaggctgattataagtcagtgccctatgtaaggcctggaacctaaaatctccaatcattgtttttgttctgttgaattaagccaccaccctaaagagccagaagcctaacactgaaggaaatagaaaatgtggatctcacaacacatcatttcaagtgtgtacatatactaatagcatacgctaaacatcatctaaacactaaatataatgatataatggcattggtcataatcttgaaggtagttgcatctccgtaaagtttcccattgagctgctgttccgctgctgctggcttccacccccagcacccacccctctagatttataatttccccaacttgggttgaagccccagatgactgggagctgcttctttactttggttcccttcagtcccttcggcagatggcacaattcttagtgtgtgtgattggggttttcagcattggctgtgcattggcattgcatggggagtgttagaaaagattgatgtctgggtactgcccccgaagattctgatttaattggtctgaggatccctgggcatccagatttttaaaagcttacagccaaggttgtgaaccatcagatcagggacaaaggcgatctggaggaagacggggcggggaaagaaaagaggaaaagagaatcctgatttctggagccaacaaagggccctgtgggagcagaggttgttgtaggataatgaaggggtgagctggcagccaagagctcaggacatgcttgaggaaagaacgttcaactcagaaataagactgctttcatgcgttaattatgcacctcttgtcttctctaatcgttttatccagggtaaccttgttggcccaaggaaattataaattccttgggatcagcaatgtgtcttacagttaccctgtagctcccaaggtctctagcagccttgcattcatgtgggattcttcaaaagtagccctcaaattactgaagaactgtgaggtcagagtggtaagtaaaagattaaaatgtctgccaatcaatcacggttgcatatgtgtgtgtttcatcatttcacattgtttgatttctttccgctatgaaaagacatatgcacacagaaaaagaacagtaacacacacaaaaaaatcagccagttaaaaccaccaccaccaccatcatcaccacagaaacttagaaatggagcccagtagagcatcagttgtcagatatgggggcttcaagtccccaaagcagatgtcatctcatgtcattgggaagtaaagatgttcacggtgcaagcgtcattcacagacacgcatgcttgagttccaagggagcagatgtgagccagttaggaagacgccaggaaaacaccatgcttgccccactccccagtctagtgtttaattcacaggcccacattgcaactcttcaatactttattaaacacatctcttctcctggataccctactaccttcagagcaaacacattctactctttgaaggcaagtgtgttcttaactgcttggatcctaccctttatgacagagaagaagaagatattgctaagggttggattagaggtaggaaactggggaagctctggtaaatggaagaggggtttaccttgttttttcattcataatgtgaatataggcaaggttagaatcccggtgcacgtcaccattgtcaaaatgacatccacaagcagtattgatgcctccaccaggtaaacagcagttccctggtatatatcagaagcgtgcttttctgtattctaagcagtttttgacacagtgctttgctttattgcaagccacaatattttcagaaggcttaaaaatccagttatgactgtagctgtgagggaagaggtctgcatggggccggggaaatttaatttttagcttaaaaaaagtcccaccaaattcaatttttctcacctttagggattctcagagttatatccagcttgcataactagtgtgttagagaatgtgttactacggggttattttttttaacacatttattatttatgaaatgcagaggaaaatagaaatgatcgtttcagggaatatcctgtagctttttttattgtattcaaagaagttgctcatgctgttttaattcaaatattaaaagttaaatctcttttcatcctgacctacatttaaaaaacactgctttagcccttatggaggacagaaaatgtgtggaaggaaaacatccactatgcattccttaccccatagttcgtcaggaatcagaatgactggcaaacctgtccaggaagtaataggaaaaacagagcgagatctctctcttctctccacatccttgcttatcccctctctcccatagcaaaccagccctgctggttatgctggtttactcggcctgctcttgaatgttgagaagctccatgtgagcccctcaatctgtgctagggaaataaagagaagagagatattatcccatctttgataagggattaatattgagaatatattgagaactcctaaaactcaacaacagaaaagcaaacaagctgactcaaaaccgagcagaggatttgaatagacgtgtctccaaaagatatatacaaatggccaatatgcacataagaagatacctaacatcactaatctctagagaaatgcaaatcaaagtcacaatgagataccacctcacacccatcaggatggctatttttgttattgttgttattgttgagaaacagtctcactctgtcacccaggctggagcgcagtggtgtgatctcggctcactacaacctctgccttctgggttcaggtgattctcctgcctcagcctcccaagcagttgggattacaggtaccccccaccatgcctggctaattttggtacttttagtagagatggagttttaccatgttggccaggctggtcttgagctcctcaccttaggtgatccgcctgccttggcctcccaagttgctgggattacaggtgttagcccctgtgcctggcctaattccccgtttttaaaatgggtttaacatctttttatatgtttattggccacttgatcctccctcagagagctatacagttttctcactttattcagtctatgagcaaatgtcatcttgtaagagaatgttctggatcaatcttaactgtaatagcatgttcctatccaatacccctgccccctcaccatagccgagtcttctgtgtatttgtatgtatattcatatatatatatatagtatcccacccccctacacacatacatatgtacttatttcctatcttctcctttctggattgtaaattttttggatgtagaaatcaggttttgttggtttgtttttcattgctgtatgcctaacatttagaatagcagatattgaataaatacttattgatttatattataaaggttgtagttttaagaaaaattcagaacacattgacctttctttactagtaatgcgctgtgtagatatggcataatatttttaacctcttctctctactgatgggaattaaggggttgtttgctctttggtgctaccaaaaaaaaaaaatctatctatctgtctgtctgtctgtctatctatctatctatctatctatctatctatctatctatctctacacacacacacacacacacacatacatacacatatatacatacatatatgtgtatgtttatgtgtgcatgaaccactaaaggcataataaacgtctgctgccttggaccagcatctctgcagggtataatcccagaagtagaacctactacatcaatgagaacactcattttaaggctggggacatcttgccaatttgttcacccaagggctttgtcaattcacactcttgccaccctacaatggacaacatatcccaccccacaaccaccacaatgctttgtctttgccagcttctatccctatttgagagatgagaaaactaatgaaaggctcacagactcaaagtcagacagtttctagttggtgggtctaaccctccctgttgcttgtgcagatctctttgttgtgatctgtttcctgtggtctgccacaaactgggtaatttataaagaaaaataagtttactcagttatgattttggaggtcggaaagtccaagagcatggcactggtatctgacgagggcgtggtataaggcatcacatggcaagagcgcatgtgagagggaggaggcgaggagtaagcaagagaaccagggggctgaagtcatccttttaatcaggaatcaactcccaagataactaacccactccagtgaaaactaactgacacctgcagtagctaacctcctgcaacaatccattcttgagggcagagccttcatgacctgatcatcttggtttttgttgttgttgttttttgttgctgtttttgttttttcagatggcatcccatctgtcacccagcctggagtgcagtggcatgatcttggctcactgcaacctccacctcctgtgcttgagtgatttccctgcctcggcctcccaagtagctgggattacaggcatgcaccaccacacctggctaattttttttgaattttcagtagagacggggtttcaccctgttggccaagctggtctcaaactcctgacctcaggtgatccacctgcctcaggctccctaagtgctgggattacatgcatgagccaccatgcccagcccagatcatctcctaaaggtctcacctcacaataccattacattggcagttacatttcaaccttggaggaaacattaaaaccatagcccttcttgatggattacatccttaggaggatctgcttccaagtgtctcacctatatggtaggtgagttagtgctggctgtaggtcgtaggcctcacttcctcatcccacgggcctgtccacaggctgcccaaacatctagccccaggcatctttcatggagagttgcaccagattctgaagtgctcaaacacatgtctctactttcactaatctctttctgttaaatttgtttttgagttgtgtgaaataaatacaatgtaaaatttaccattttaactttttattgcacagtttggaggcattaaatatagtcacactgttgtgtaaccatggccactgtacatctctagaacattattcatcttgtaaaactgaaactctatatccattaaacattaactcccattatgtcttcccccagcccctggcaactactattctcctttctgtctttatgaacttgactgctctagtatctcatgtaagtggaatcattcagtatttgtctttttgttactggtttatttcacttagcataatatccttaaggttcatctgtgtcatcacatttgacaagatttcttccctgtctaaggatgaattacattccattgtatgtgtaaaccacatttctcttatccctccattcatctgtagacgcttgggttccttccacacttgagttactgtgaatgatgctatgaacgggagtgtacaatacctttcagagtccctgctttcagttgtcttgggtgtatagctgcaagtgaaattgatgaatcatagagtaatttatttatttattttttagtaaccgacatactcttttccgtagcactgcatcattttgcatttccgtcagcagtgcacaagggttccaatctgtccacatcattgccaacacttatattcaattttcagaaataatggccatcctggccaggtgcagtggctcatgcctgtaatcccggctctttgggaagccaaggcaggcagatcacctgaggtcaggagttccagaccagcctgaccagcatggtgaaatctcttctctactaaaaatgcaaaaattatccaggtgtggtggcaagcacctgtcatcccagctactccggaggctgaagcagaagaattacttgaacctgggagggagaggttgcagtgagtcaagatcgtatgactgcacactccagcctgggggacagcacgagactgcgtctcattaaaacaaaaacaaattggaagaatttaaaagggagtggggaagaagtatggtcagaacattttccaaactagtgttcattttctatatccaaaattttcatgcagtgtttacctctctttatcttaagaaatcaataattgggatttcattattttgttttgtcaaaacaaagttattgaacaacaaaataccagtgtttgagtgattaaaaaacaacaacatggtattgaaaaatcaaagtacttatcactaaagttaatgctcatcctctcagcccaccagccaggggtcagggaggggacacgattgcacactgggctagagctgctgtccgagaggccttgagggtaggcgtacgacagcagcatttcagaggtagttggcaatgctcctctgccacccatagtgagacagggaacttcctgggcttctggtacagagttttcctaacagtatgtgcatacctagctgcagttcctggtctagggattcttgctatagaactacagagcggtaacttgagtcactgtgaaagcagctcttcagtctggactgaagttgctgcgcttgggattttctttttcatgatgttttcctttatttcttttatcaatacagaatacgtatttatgtaataaatatgtgagtatttttttacatgcagagaatatgtcatgatcagtatttgaaagggagacctgcctttacatgtttattgcagcactacttaaaatagccaagacatggaatcaacctaactgtccatcagtgggctaatggacaaagaacatgtggtatatgtatgcagtggagtactatttggacataaaaagaaggaattttttaaaaagataacaaagtcatgtcatttgcagcagcacagatggaactggaggtcattgtgttgtgaaattactcaagcacagaaagacaagtaccatattctcactcatatgtgggagttaaaaaatatgatctcgagatttttttctttaaaggaaaaagctgtgaggccctttgcttagtttggaggatctcagagggaaaggggccacgctttgtgtatcacttgaatggtcaatttaagccaggtgcggtggctcctgcaggtaatcccagcactttggaaggccgaggctggcagatgacttgagctcaggagtttgagactagcctaggcaacatggtgaaaccctgtctctaccaaaaatagaaaaaaattagcttggcctggtggcatttgcctgtggttccagcaagtcgggaggctgagataggaggactgcttgagcccaggaggcaggggttgttgcagtgagacaagatcgttccactgcactccagcctgcgtgacagtgagacccccatctcggaaaaaaaaaagaaaaagaaaaaacagcttatttaacctattcgagtgaccttgagctatatgcctatctggcctaattttcccatcatcgaagtgagataataatacatagctcagagtgtatggtcagaattaggggaggcagcagaagtaatgtgtttagtgtggttcctggcatgtagcagatgttcagagtggtagtttcagacgatctctccaagtctttgatagtttcccttcataaagtagagcctcatctccctccccatgaatagaatagaatgtagcagacacaataccatgtgacttccaacagtagatcataaaaaggaaatctttttctctctcttcttgtcaattttcttttgcaataatgaatgattactgttgtcttaagccattacatttcagggtaatttgtctcatggcaatagataactcacactttcagtagtatttgcagccaagatctgttatccttgaatattcaaaaatctgtgacctatccccattgtgcatgtacacacaagcacacgctcccctacatactttgctgacatcttattcttaaatgtaatgtgccttattcaaagggtgattaggaggtttgagaatcagtgtggcagctaagcgagacatcttccttgttttaatcagaagaatggaaagtgctttgtagaggcgaggtggactgtcaagcacagagcatgcatgtctctaaggcatgccacagagtttatccggggccaggatacctgtggtctagatcctagaaaggagggatgctagcctgcacatcggttgctaatggaacccttgggtttgtgtgactggggaccaatctgtgccgatgtgtgaatatgtctgctttgcttacactcaggcagtgattgcatatctgggggctaatgagctaagtttggataatggcaagagggtttcttctcaatgcgcaagagtattttgcctgcgtcaggctgactgcgggcatttccttagatctgaggttcactttttgctccgggggttcagcttctgtacacttgatggatgctggtcttaatttggtgtgttgcagtcattgcgagttgtgcaaggatattaccttaaggatattcttttgaatattaaattagaataaattaagggatgctggatattaagcctaaatcagagatgagtaattgccttccgttttatgccgttaagtttgttggaaatgcaagatatttgttttaattaccaagttgttgaaccaactctcaatgagcataggcacaaacagaaacaaataaaaacttcttggtgagtttgtgaaatgtagataacacctaattggatgcattttgttagtgcctgtcctattatcattactttcttccttcatccaacattgagtaattgactcccgactatgtatccagaaacgtaaaatgctctggggaggatattaagggctacatttttttcattgcttaattgtttcctgtatatgccagcctaagcacttgacatccctataaaatattcacagaagcactataaggtaattatgactatgaccgctatttcacagatacaaaactaaggctgagagaggatagcattagattaatattaaaacaaaaactcatacagctagaggtagggtaattccatactgtattggtaattcaaagcagataaaattgttgcctcttgaaagcctgtgcccaaaacgctttaaagaggttctttccgaatgctcaaaaacagtgtattttaaaagctgctctctgaaatttttaagatccatcagccagagtgtgatgttccccttcctgtgtccatgtgatctcattgggactgttgtggggtggggggaggggggagggatagcattgggagatatacctaatgctagatgacgagttagtgggggtagcacaccagcattgcacatgtatacgtatgtaactaacctgcacaatgtgcacatgtaccctaaaacttaaagtatgataataaaaaaataaataaaaaaagatccatcagccagtaattttacctttaaaatgttatcaaaaatgatatttttttccaaatttttattctggaaaattcaactatgtctgtaagaaatcaaaatagtataatgaatccctgggtactcagatacccagattcaacaattgccaactcacgaccaacactgtttcctttttaccttcattcccacatcccccgaacaaccaccccacatgcacaatgtatcttttgaagtagatacttttctttgttggtattttaggaaagtcttattaatgtagactttttttttatagttttctatgtgttggccattcagatgtcaatgaaaagagtcaaactctgtaaaacggtgaagatatttattctgagtgacataggagtgacacagacatcaggagatcctgagaacacacacccatagtggtcaaggcacagcctagtttcacacattttagggagatgtgaggcattaatcaaatacatgtgagatttacattggttcggtctggaaaggtgggacaactggaagcaagggtatggtgcgatgggcttccacgttattggcaattggttaaaagagttattatcgatagaaaagaatgtctgggttaggataaggggttgtggagaccaaagttttatcgtgtggatgtagcctccaggtagcaggctgtggagagattagattgcaaatgtttcttttcagacttaaggtctgtgttgatgaaatgctggctggcttttcctgaattccaaaagggagatgggtatcatgaggcattcctatcatggtctgaatcagtttttcagctcaactttggaatgccctggctgagaggagaggtccatttagatgggtgggggtggggggtgggcttacaattttatttttggtttacgcaagtctgtagaaatgggagctaattgtgatatggatatccctcagtttctgcttgctttttagaagaaactgcaatcacataccttaaaaaaggaatctacatatagaaattttgaactattcaagttcattgtttaaaaacaaatttctggatttactttcctagtgtagaatataatctgtcattgtccagattagatcattgtcctataaatatcaggtaggttgcagatacaataatgctgcgcagatctttagcctttgtattttttggtatcgtcacaaggaaagtaaaaatagtaattgaaaccgaagcctattgttggcaagaaggttaagttagcacagcacatagagcattacctggaaaatagtaagggtcggaaaaatgtaactgttacactgttgctgttgttatttttgttgttcttgccatcacttttcttgtctgagaaatttctaagtctcatccataatattaataaggattaaataaggtaaatgcctaacattctagcattaccagacactgaattactgtattttttctcttcatttttttttcctctggctatgtgtggtggatttagttggactgtttataggaggacaatctaggttaaagggcagaaaattgtatttttggtagaattggggctttgccatgttggccaggctggtctcgaatcacttgagatcagaagtttgaaaccagtttggctgtcagggtgaaaccctgtctgtactaaaaatccaaaaattagctgggtgtggtgggttgtgcctgtaatcccagctactcggtaggctgaggcaggagaatcacttgaacctgagaggcagaggtagcagtgagccgagattgcaccactgcactccagcctgggtgacatagtgagagtccatctcaaaaaagaaagtaaaataaaaaatggagaatggagattttgcccaggaatgcactgtaactgttcttgtagtcactttccttagagatctgccttgacatgtgacgaactctggaatatcaatgctaccatggggtttgttcttttcctgtcattttactcttgaagaaacagtggcccagaaaaatttagcaacctgccaaggtcacaccactaactaatggcatagctggaattagaactcaggccaatgaagagaaaaataatttattaggttttgaaatttgatatataaaaaccataaaggtttccccacttctcaaatattgcagacatgagtgtaatatgagtcattattttgggccaattttgcttgaaataacaataaattacctagagtcacaaataatatataaattggtccaaagttttaggtagctttatatatgtgtatgtgtgtgtgtgtgtgtgtatatatatatatgtagctatatatagtagacatctgtttttatctgggttaatgaatgtgctctgctttgcacagaatttaaatagtttcagaatttttctttctttttttttttttcttttttttgagatggtgtcttgttctgtcatgcaggctggagttcagtgggagtgatttcagctcactgcaacctctccctcccaagttcacttgattctcatgcctcaaccacctgagtagctgcgattacagccgtgtgctaccatacccagctaatttttgtatctttggtagagttgaggcttcactatgttggccgggctggtctcagactcctggcctcaaatgatcagcctgccttggcctaccatagtgctgggattacagatgtcagccatcatgctggaccagaatttttcactaagagggtatcatatagctggtggaagatacatgtcaaggctctttgtaatttactgcatattattcaatttcactccataaatgcataatttaatcacaactctggtttaaatgatatagcaggaatgacatgggtggaatttaaagtttgtataatttatatcatccatagcactttgaaaaggcacaggtcagcctggcctacagggcaaaaccctgtctctactgaaaatacaaaaaatagtaatcccagttacttgggaggctgaggcaggagaatcacttgaacccaggaggcggaggttgcagtgagccaagatcacgctgctccactccagtctgggcaacagagtgagactccatctcaaaaataaaaataaataaataaataaataggtacaggtaggttacctctggctatcagaggggcttgggcatgagtccttgttgctgcccatataggaaggggctgctgtgagttgctctgaccaagctaggttttgggagatgcttaaaagcaaaagctcaaactacattgctcacttcccatccgacaattccaggaacttaacaattcaggagcagctaaagctcctttaatcttctctctgtccacacagcaaaaactgacgagtgagtgatgacaatgataatttaggtaaatattgatgaagggaagaataattctctatactttgaatgaaattcctctaaatctaattcatcctcttggagagaagcaaaaaattgggtattcaggggtcttatttgtacacttcttttcttttttgaggcggagtcttactctgtcacccaggctggagtggagcgacgcgatctcagctcactgcaagctccgcctcccgggttcacgccattctcctgcctcagcctcccgagtagctgggactacaggcgcccgccaccatgtcccgctagtgtgtgtgtgtgtgtgtgtgtgtgtgtgtgtgtgtgtgtgtgtgtgtagctgggagtacaggcgcctgccaccatgtccggctagtctgtgtgtgtgtgtgtgtgtgtgtgtgtgtgtgtgtgtgttagagatggggtttcactgctttagccaggatggtttcgatctcctgacctcgtgatccatccgtcttggcctctcaaagtgctgggattacaggcatgagccaccacacccggccccccttatcgtatacttctatatgtgtatggacgcctatgtgcgtgtacgtaagtgtggagggagaaatggaggtgggtagttaaacaggaaagagtcttagttggaatttcatttcaagtctactgggatatggaggcaagaatcctcaggaaatccatcagcagactctcattccatgcatacatatatatatattcccttccttccctcccattacctccctccctccatcccctcccattccctccctcccatttcctctctccctcccttccctccttccctccctccctccttccttccttccttccttccttccttccttccttccttccttccttccttccttctctatggcttccagcaagtagattagccgtgtggaaactcagttttctcatttggaatattaggaaatccctaatttaaaataaacaccaaagtcctctaacatactgtaaaagtgccgtaaacttttgatctattctttcttcccagtaaggggaccctgctggtgggtttcctgaaggttctcacacctgtccaccaagagacttgaaattccaacagggaatctcctctacctactaaattatgcccctcctctgcccttcatacctgttgaatattataagaatgggtttatctataaagcaggtcagtcatagtaatagagctgatggttaggaaaggtggatagacagagagagattggatttggcttctgagaatgtggtaactataccaagcaagaggtagaaggcaggtgaactcatactcaccctattggaggacctaacaaataagaatgagctgcttttttttccccctaactctttcccatctggagtgcagtaagtgcaatcataactcactgtagcttcaaatgcctgtgctcaagcagtcctcccgcttcagtctcccaagtagctgggaaaggatgggcacaatggctcacacctgtaatcccagcactttaccaggcggaggtgggcagataatttgaaattaggagtttgagagcagcctggccaaaatggtgaaaccccatctttactaaaaataataataataataaaaattagccacgtgcagtggtgcacacctgtaatcccagctacttgggaggctgaggcaggagaattgcttgaacttgggagatggaggttgcagtgagccaagatggcaccactgtgctccaacctgggtgacagtgaaccaggatcccaccactgcacttcagcctgactgaccgagtgagactccatctcacaaacaaaaaacaagttgctgagaccactggcacacaccaccacgctcagctaattttttgatttttttttgtgacattttgttgcccaggctgatctcgaacccttgggttcaaaccaccctctccgtcagcctcccaaaatgctgggattacagttttgagccattgtgcccagccaggatgagctttaagaatgttgacaacatctccatctcctgggagatgaagcttcctagtgagactatcagttagagcattttcctgtggaagcatcaagaagacaagagtagactaaggcaagtgattgggtgatcaagacagagtggacttttcagtgcaggagacggtgctaggcagagttgagtggacagcgagaaggataagatggtgtctgacttggatgtgaacttgacactggggcatctctttggacaagtgaccatttagagactctcttgagagacagactcacaagcaggtaaaaaataagggcaaatggtttttatatattgtctccaagtcattctcagaaaagatggctgaccctgaacaggttttgaggaggacagtccttctacatgggtgtagtgtgatgctcgcagtttgcagtatacaaagtacacagttgtggtaccgacagggctcgcattggagattcgacatcaccatgtgcttttgtgacttgtttcgtggttgaaaaaagcaaaatggatcccccaaggctcttcctacccagacccaaatgggcaagcggggagaaagctccctgaatgcctttacgttagatgctgttgggattcagagcaggtccccaggagggagccaatctgggtattcattccttagctgctgtaatactggcttgctaatggctaccagctctccactctccacagacctgagcttggccaaatgggaactgctttgcctataaggttatagagccctcaagagaaagccagcagtcaatgactgatcaaggtgcaaaaagaatagcccatttgtcttaaagagggtgttaaagcaaaccaaatatggcttgaaaaggactgcatacttctatatttgagttcttgtggatgagctgtcagctagcttaatagacagacaagactgaaaatctaacttaagagtatgggcctgtgggccgggcgtggtggctcacacctgtaatctcagtactttgggagtctgaggcaggcggatcacaaggtcaggagattgagaccatcctgactaacatggtgaaaccccatctctactaaaaatacaaaaaattagccaggcgcggtggcgggtgcctgtagtcccagctacttgggaggctgaggcaggagaatggcgtgaacccgggaggcggagcttgcagtgagccaagattgcgtcactgcactccagcctgggcgagagagtgagactctgtctttaaaaaaaaaaaaaaaaaaagtattcgcctgtaacaatagctgagtcttggccaatcccagcagctgaacttcaaccactcatagactgttaagtgttcaaaaactgtgttcaaataaggcaaacgctgagctgtaaccattctagctttttctgtacctcactgctgatttctatacatcacttcccttttttcgtctataaatttgttctgaccatgacatatccctggagtctctctgaatctgctgggattctgggggctgcccaactcacgaactgttcattgctcaaactcctttaagtttaatttggctgaagtttttattttaacagggacaaccaacactgcaaagcctgaaacctgtggctcaggcccaggctagactctacttaagaccacaccctggccaggcacagtggctcttgcctgtaatcccagcattttgggaggctgaggtgggtggattatgaggtcaggagttcaagatcagcctgcccaacacagtgaaaccctttctctactaaaaatacaaaaataagccaggcatggtggtgggcgcctgtaatcccagctagtcaggaggctgaggcaggagaatcgcttgaaccgaagaggcggaggttgcagtgtgccaagattgcgccgttgtactccagcctggcaacagagcaagactccatctcagagaaaaaaaaaaaaaaaaaagaaagaaaagaaaaaagaagaccacacccttgcttggccacttccctgccttacatgacttatctccacataggtgacagtgactttggatcagagtgatagtaaccagaagtggtcacgatctggtatattttgtagacctcttaggaaatgtgtacattaagagactgggtctcgtagatctcaggtggaatcttcagcctctgtctagtttttgtgggggtctggccatgcatcacagcctagaaagtgcaggaacctgggctgatttcatggttcagtacatggtttcctgggcaacctttctgccccttgacatacatggataaagtcctgttgccatagtaccctcatatgggtgtatctcatctatgccaactagagaataacctgaggactggagggctttgggtatgatttgtcagaatccaattagcaactccaattgattgatgatggctgattcgtgggtagctatgaatttgcagctcttagctattctgtctgtaaggatgaagacagtctgaaaagtggctgactgctgtatggagtactctttgctcctcctgggtgaaaagggtcgtgacttttagcagctcttcttcttatcttaacattctgaatcccgtgttctaatgcattattgagggtttgtgaagacagagcaggggccagctctgcacccaacgtccctttgctagggtcacgcagaggtaggggcacagtacatagggatgagagtatggggaaaaaagggctgtgacctcagactgcttaggaaagcaaattggcagcaaagttccagctcagccacttaatcttcacgtgtccttgggcaagtcatgtgacctctgttagcgtgttatgatggtgagaatgtgtacactaggggtctcaaacgcagatgcttacctagggccagacagttaatgttatcagtcaaacatggcccattgctggtctgaacaacctgtgccatttctagatggccatgcaggaatgtagatccaatggtgccagattttatcgttttaaagaaaatatggatattttgatttttttttttgtaaaatgggaaatctaattctcatttttggaaaacactacctgaccatgtaaagccacatctgtgactcatgggcaaccagtttgcatctttgatgtttatttttgtatcagaatccgctggtgctggctaggctcggtggctcacgcctgtaatcccagcactttgggaggacgaggtgggtggattacctgaggtcaggagttcaagaccagcctggccaacatggtgaaaacccgtctctactaaaaatatacaaattagctgagggtggtggcaggcacctgtaatcccagctacttcggaggccgagacgggagaatcgcctgaacccaggaggcggaggttgcagtgtgctgagatcaaatcactgcactccccactgggtgacagagcaagactctcgtcccccacaaaaaaggaatctgctggtgctaaccctaagcccccaggggcgtttaccatttcaaggcattctgcctcaatttccacaagtgtcttttggcctgaggtctttctggagcctctggagccccctttgcctacacagatgcttcactggaaatgtgagggaattaaagcaccctttccccagcaaccttcaatgggtaactcaggatttgctttataaataacccagttttccttgcttctcaagtgggataactcatgattaggggttggcaagtgtttacagtaaaggaccagatacagagaatattttaggatttgggtgccatatggtttctgtgataactgctccactacatccttgtagtacaacaatagccatagacaataacatatgggtgtggctgtgttccaataaaactttatttacaaaaatagtcagtgggccaggtctggccagctggccctgtactgggcctatattgcttatctgtgccataaagcaagctctacgcttattgcctgagttctgtgatgaaaataagctgttacccactatggtaactggcttggtaatgggctttctgcatagcctgttttctcctccttgttttacatctcccatccctactgtgttttctaagaaccttctttcataaaagcttcttgcatttaaaacctgttctccaagaacctttttttcatttttttgagggggaaggtagtaggggttagggtctggttcagtcacccaggctggagtgcggtagtgagatcacagttcactgcaatctcaaactcctgggctcaagtgatcctcttgcctgagtctcccaaatagctgggactacagactcactccactctgcccaactaattatttttaaaattttttgcagagacagggtctcactgtattgcccaaggctggtctccagtttctgaatctcaagcaatcctcctgccttggcctccccaagtgctgggattataggtatgagtcaccacatccagcccagaaacctttcaaacgttgttatttggctttatgtttgggagccatttgaatgtgtatttgaatcccagcctgaccagtttcctagccctgttgggttgagcaagtcccttcacctctctcctggcctcaggctcctcatctgtaattgagagaaggtctgtgctttctcagagaatagttaagaggatttaatgggataagatctgttaaactcttagcacataacctggcccatgttcaaggtccaataaatcactggctgtgatttcaactctttatgtgaaggatgcagtttatggctgtcttttaggaattggccaaaatgatgagtcagaagctcttcttattttcctgtttttcaccttgattttggagtaaggtcacccttcccacaggtagggtgtgatttaacagtctttaagagataacattatgaagacacctgggtgcctgagccttttgcatcttaatcgctctccctggtttcctaagagaaggaacagatgggagaatggagactggcttcaactggccgtatttcatccggctgagaacatatgttcttgggaaggatgtaggaacaccctgaaatagagcgaaaaagagatgtgagatgagagaaatcctcctgaaacatgaatggacttgagttcctgttgcccttccttgcagcttgctgcctcctgccttgcgtagaaggaaaactgttcctggttccagacagaatggatttaagttctgttctatcgttatctccttgggaaagctatatgacttctctgagcctcagtttgctgaaatctatttataaacgtttacttaggtggctttcttttttagctattcatctgattacattttctcttgctctttttcattttttggagatggagtcttgctctgtcgctcaagctgcagtgcagtcgtgcaatcttggctcactgcaaagtccacctcatgggttcaagcgtttctcctgcctcagccccccaagtagctgggattacaggctcaacccaccatgcccagctaatttttgtattttttaaatagagacaggctcttatcacgtttgccaggttggtctcaaactcctgacctaaagcagtccagctgccttcacctcccaaaatgttgggattacaagcatcagccaccatggcctggcctacatattctcattttcttctgcggtttgagaaggagtagaaaacaatacaaaatagaaacatgcctttcagccaggcatggtggctcatacctgtaatcccagcactttgggaggctgaggtgagaggatggcttgagctgaggcattcaagaccagcctgggcaatattatgagaccatatctgaaagaaaaacataaaataaaaattttaatttaaaacaaacaaaataaagccaggtaatggaaacaaactctgacatctttctgctacatgtccttttctttctccctttctttttttttttttttttttttttttttttgaggctgagttttactctgttgcccaggctggagtgcagtttatctcggctcactacaacctttgcctccttggttcaagcgattctcctgcctcagcctcccaagtagcttggactagaggcgcccaccaccatgcccagctaatttttgatttttagtagagacagggtttcaccatgttggccagactggtcttgaactgctgacttcaaatgatctgctcgccttggcctcccaaagtgctgggattacaagcgtgagccaccacgcctggcgttgtgtcagtcttatcagaaactccctcctccatcatttgactatgttttgaaatgttcactactccattcaacaaaaaatgcccatacaatccagaagaggaagcgtcttttctgataattttagcctaaatcctagagagatgatttgatttgtgtcatcagtcttctgtccgtctataaaccgattacagtgaccagagggacagcatcctctgactgtcaatgaggaagggagagtgggttataccatcctacgttgtgtggacgagttgggttgctgtagaatgggatagtttgagacagtttctcaaaggaagggattctcgattaagaaaagaaattcgactctatggagtgtgattcgtaaaagggagagtaaggacaaagctattgtcaaggtttctttatcctctgaaatgtaattattgactttttttaaaacatggatagggatatgtaactgatgccttcccccacccccctgaaaagtctaaggtctagaataaaagctacaaaagctaaattccaggatatagaaacaagcctataaaaagcaccttcatcaacaagaaacaggctcaatttcacaaaacaaacccataaagggagaagaaagacatgtaccagttagttttcaatcttcgctcaccttttgttccttcccttcagtgaaacaggccttgctgatgggttttactcattccatggtgtattagctggctaggggcaccataacaaaataccacaggctgggttgcgtaagcaacacagatttgttttcttacccttctggaggctggaaatctaaagccagagcattggcagggtctgtttcttcttgggcctctctccctggtttactgatgacgatcttcggggtgtgtcctcacttggcctttttttttgtgcctacgtgcatcttggatatctctttctctttttctaaaaatggcagtcaaattggattaaatccccaaccttatgacctcctttgaccttaattacctccttctaggtcctacctccacatatagtcacgttaggagttaagacttcaactaggaattttgaagggacacaattcggttctgggaattgttcattttcttctgaattttttttttctgtgtgtgtatgagcagaacatctcttcacccggacagaatgcaattccaagcccctctgttgctgaactgttctccctttaaaactgtcttcatcctcagcgtaggtagctccttccctgagtacgtttttttgttgttgttgttgttgttttttggtacagagtcttgctctgttgcccaggctggagtgcagtggtgtgttctcggctcgctgcaacgtctgcctcctgggttcaagtgattgtcctgcctcagcctcccgagtagctaggattataggcatgcgccactacgcagaggtaatttttttttttttttttttttttaagtagccatggggtttcaccatgttggccaggctggtctcaaactcctgacctcaagtgatccacctgcctcagcctcccaaagcgccgggattacaggcatgagccaccatgtccggccagcacattctttgtctttgcagaaccatgctcccctctgcatctcacagcctcatgtacacacccattgctttatcccatagaatcacagttacttgtgtggatctctgtccctctgtccacccaccacccactacccactacaccagcatgcactgagaacagggtaatgattcagcagtttggtatcctagtgcctggcacagagtagatgtttgataaatgtttgatgacctgaattggattgaagctgaacaaatagaaattgcatttggccattatttccaggcttagaaatgaatgtgtgttaggagacttatttccatagcattaagataatacaatatatatgcaggtgctgtgtgccttatgtagaagctctaaatctctctcaaggatgcagaaagaggtgaggttcaggttgagttgaagaatgaaaaaagagttgcttaggagaacaatgctgggaaagggaggagatttgcggccatgtaatatgggtaggtgaatttcacttaatattgtggcagaatgctctatcacaacagatgctaaaggactacatttccttcctcagctctttcttttttctttctttctctgtttttgtctctctttctctctttctgtttcttttcactctttctttctttctctctttttttttgacataggatcttgctctgtttctcaggctggagtgcagtggcatgatcacagctcattgcagcctcaaacttctaggctccagcgatcctcccacctctgcctctcgagtaggtgggactacaggcacgtatcaccatgcccagcaattttatcttattttttgtagagacagggactccctatgttgcccaggctggtcttaaactcctggactcaacaaatcctccagcatcagcttcccaaagtgttgggattataggtgtgagccaacaggccctgcctaacttttttttcttaaccagttaagaaaaggcatgtgagtgaaagaaacgtaatagagtcacccatcttctgaggggtcagtttcagctgtctgtaggctggatactggagtcattgtcattattgtctgagggtattctggctaactctttctaccaaataaatcaccctagtataatggcttaaaacaataacgtacatttattttacttaagaatctcataatggagtcagctcacttaatcaggagcttttatatagttacatagtggctgagtctggggtggttttttactcataagtctggcctgggaagactcatagagtaggagcaggaatattggggactactaagatctctctttctctccttgtaccttgttctcatctctccatgtggttttttctcatggtgatttcagggtagtcagccttcgtaagtatagtatcacttttgcctcatggattcagtgagtcacacacaaatgtccacccagattcaaggagagactccacacttctctcttttttctctctctcttttgagatggagtctcgctctttcgcccagactggagtgcagtggcataatccaggctcactgcaacctccgcctcctgggttcaagcgattctcctgcctcagcctactgagtagctgggattacaggcatatgcaccaccatgcccagctaatttttgtatatttagtagagatggggtttcaccatgttggtcaggctggtctcgaacacctgatctcttgatgggggcatggcaacattaccaaaaagcatattaacaggaaagataattgtggccactgttgaaaaaagtggtttctcatacgtggttgatcagatacatgtacctttatctttctgaaaacgattgctttgttccttcatttaatatttccccacaagtgcttcgcagagcacatagtcgttgtgaaggctctatgtggcactctgagagaaggaatccttcactgctatcactgagatgaaagaaaaagagtaggacctttccctgctacgtttctgtagatttctggttctaaaagaacaaacttaaaggtaaagctcttgtgtgtgcaaaaaagtagaactccagttttgacaaagtagttaacttagacctgttagaaagtaaacttgttgggcatggtggttcacacctgtaatcccagcactttgtgaggccaaggcaggaggattgcttgagcccaggagtttgagaccagcctgggccacgtattaagaccctgtctctacaaaaaattagcaggtgtggtcatgcacacctgtagtcccacctacctgggaggctgaggtaggagaatcacttaggcctgggagatcaaggctgcagtgagccatgatcatgccactggactacagcctgggcaacagagcaagactctgtctccctcctccctccaaaaaaaagaaaagaaaaagaaatgaaaaaaaattatccttggtagggccgggcacggtggctcatgcctgtcagctcagcactttgggaatctgaagcgggcggatcacgaggtcaggagtttgacaccagcctggccaacatggtgaaaccccatctctactaaaatacaaaaattagctgggtatggtggtgcatgcctgtaatcccagctattggggaggctgaggcaggagaagggcttgaacccaggtggtggaggttgcagtgagcctattgccccattgcactccagcctgggggacagagcaaaattctgtctcataaagaaaaaaaaattgtcattgtttgaactatacatctttacctcacctggcaatgtatattaagcattattatttctatattgcaggtggcgaaaccaagccacaaatacaaaaacaaagaaggcttgaaggtctgcgactgagtagaacttaggtgtatgtatgcctctttccactgaaggaaaaataaccatgatcattcccttatattttgctaagctgggtatgtgtccggtgctctcagacctgttacctatggtactctttaatcaaataaaaccttaagttcaaacatatacaccgaaataaggcagaactactctgaaacagaagatttatggagtctctttcaccagcaacttaataacatagagatcacaatgtttcccatatacatgattttttttgttgttgttattgtttttttttgagatagagtcttgctttgtcgccaatgctgggtacagtggtgcagtctcagctcaccgcaacctccacctcctgggttcaagcgattcttctgcttcagcctcccgagtagctgggattacgggggtgtgtcaccacacctggctaatgtgttgtatctttagtagagatggggttttgccatgttggccagcgtggtctgaaactgctgacttgaagtgatccactcatctcggcctcccaaagcgctgggattatgggcatgagccacagtgcccagcctcacacgcacacgatatttacacatacatacatataaatatacatattttatatacataatgggtgttggtgcatttcataggcttgtctttgaatatcaagatttcaaactggtttgcaactgatagaaccgagaaaaataactcttggatacctgacttgaatctctctttgcccattggcggccaaagccagttgttgacgtaaagttttttttggttgttgttgctaattgcatctctttcctgacagaggagtaacctcttatttacaaaagtgtttacagttttacatacccgataggtcttacgcacatgtcaagacaaggtattgagccaggcgcatatacccctaatatggcaagagagagaacttctctgtcaacaaggcggtaataaagtgtaacagacaacacttaaggtgtcagtcacctttgcaggcgtattggaagttacaggttagatctagtggttttgatttattttgatgtcaaaaagttactcacatatttatgtaaaaagagagtggcaaatcaacggggtgttgattttgaaggtgctatgtaataaatcagggtagcgattctggtcatctcgccaattttgacagtgagacttgcttatttatggcgttttaaggtctgaggagttgatttatagttacaataacggtcttccatccattagtagttccggcatgcatagatgtgtccctcgtttgcatttaatgattggcatttttaaaattacacgactataaattgtcaagcaggaacaaaactcagtttaaaacgtaattttgttgaaacatttgttttaataaaaagggggtagttgggataaaatacatgccaactgtcctcacctgttgtccaccccaatgctatattaattatgatcctatatcctcctcattatgtagatggagaaactgaggcaaaaagaggcatgatttttctagggcagttctccaatatcaggtcattgcatttaggggctctcttaagtgcaggtgcccaagtctagccataggtgaggagatgagccccagagaacatgccctccagaggatcttaaatcatcacctgacttgagcacccagtttgaaggcaggtagaagggttcgaacctcatttctgtggattagcaactttataaccttgggcaagttgccttttttctatcaattcatgtgtcctcaaataaagaaaggtaattatcctaaacttattaggctattttaggcatcaaatttaatatgaaggctgggtgtggtggctcgtgcccataatctgagtactttgggagactgaggcaggaggattgcttgagcccgggagttcaagacaagcctgggcaacactgggaaaccccatctctacaaaaaaaaaaaaacacacaaaaaattagctgggcatggtggattatgcctgtagtcccagctacttgggaggttgaggcaggaggatcagttgagcctgggactgagatgtttcagtgaactgagatggcaccactgtactccagcctgcgcaacagagtgagaccttgtctgggaagaaaaaaagaaaaaaagaaatttaatctagaactccctagcgtacgattaagtaagttatcaataatttttttctctttcacctttaagccttccccacatatgcacacacacacacacacacacacacgtgcacatacacacactcaaaacccctgtgttctggacttactgattaattttatgagaacgttgttctgtgttccactggttagaagtacttaaaatgatcacattcaggcaagatatgaatctcacggaattaaattagctcattgcttgcttttttcaaagggcagttttactcttctctgtgaacatcttagtgtaatattggttttatatgctggtgcattgtattgcccatgtgacagcaatatgagagaaaattaatagtatttttcatcttttgctacaccaccactttatttatttaggtatgtatgtatttatttatttatttatttatttatttttgagagggagtttcactcttgttccccaagctggagtgcagtgccgctatcttggggctcactgcaacctccatttccctggttcaagtgattctcctgcctcagcctcctgagttgctgggattatagatgcatgccaccatgctcagctaaattttgtaattttagtagagatggggtttcaccatgttggtcaggctggtctcaaactcctgtccgcaggtgatccaaccaccttggcctcccgaagtgctgggattacagatgtgagccaccagacccggcctccatcactttttgtaatgagggtgaggacacatttttgattaagtgagttatcttccctttagtgagttaccttccctttgttttgcttatctgagtgagggccacagaggctggagttgtaaatgggacctggacagattgctaagtctgggaaaagatggaatgaggaaggatgagaatggagatgggagtaccacacaggagatcgtgcagagaggcagaggagaaggactttgctttgaagagtcaggcacaaagagctgggtgaagagagtttttagagagtcttgctaaggaatccccattcgtcatctcccacattaattattccccaaagtattttgctgctggagttcttcagtgtcaagactggactcaaggggaatgagcaggctccgctgtcttccagtgaatacttgaatttgtcaagagtaagctacatgctgggctttgtcatcgtcttctcaaagagatggtattgaagattttaatttcagagtaaacctggagtggggaaggagaattgaaacctaagggccagtgggggcagttgtacctcttgcctctggtcaggtgtgggagacagaggagtgagtggttcaaatccacagcccgtcttcccttcttgtgcctgctatttgtggctgatgttgctccagttatctattgcatcatatcaaaggcatttgctctgcttaatgcctttagaaaacaatttaatatcatcttcgatggtcttgtggtttgaccaggcacagatgggtagataccgcttggggtatctcatgtggttgcagacagagagcagctggggctggagctatccaaggatttggatgggctgggtattcaaggtgacttctttcctcatttgtctggcatctgggctagttgtgttaccaggaaggggtccagatccagaccccaagtgagagtttttggatttcacacaagaaagaattcagggcaagtctgcagagtaaagtgaaagcaagtttattaagaaaggaaagaaataaaagaataggcatattccatcggcagagcagcccaagggctgctggttgcccatgttttttggttatttattttatttttttatttttatttttatttatttatttatttatttatttatttttgagatggagtcttgctctgtcacccaggctgcagtgcagtggtgtgatctcggctcactgcaagctccgcctcccgggttcacgccattctcctgcctcagcctcccgagtagctgggactacaggtgcccaccactgcgccaggctaattttttgtatttttagtacagacggggtttcaccatgttagccaggatggtctcgatctcctgacttcgtgatctgcctcccaatgtgctgcgactcacgctcagccggttatttcttcatgatatgctaaacaaggggtggattattcatgcctccgcttgttagaccatatagggtaacttcctgacgttgccatggcatttataaactttcaccgtgctggggggagtgtagcagtggggacgatcagaggtgactctcatcaccatcttggttttggtgggttatggcatctttactgcaacctgttttatcagcaaggtctttatgacccgtatcttgtgccgacatcctgtctcatcttgtgacttagaatgccttaacctcaggggaaagtagcccagcaggtctcagcgtcattttacccagcccctattgaagatggagttgctctggttcaaacatctgtgactgttgggctgggataccttagggaaagccaggcatctctcttttcacacagcctctttgtgtagttagcctggacttcctcctagcgtgacagttgcagattagtcagagcccttaaatggcccctcccttttccatgcaggacatctgtgacctagcccgagaagtcacacagcatcacttccagcatattctcttggttacacaggaccagctcctgcatagggtgggaagggactactcaggggtgagaataccaggaggcatggttcatcgaggggccatctttggagactagctctcatggatgttaaaggcagcggcttgtgagctgcagaaatgggtgaccggattttgcacgttttttgagaagcaaggggaggggaaagttaacttaatatgggagggctgcaaaagttgaggcacagcattttttccagtaagcttggccgtctttgctgagccctgcacgatgcagccgttagcaggctgggcaatgctttgctttatgaggcaattattccaacacactctattcaaaatacacattagaacttaaccttctgaatcctcaagtagcatttttatcacccaccattagaaaagagatggagtcagcatatttccccccctttttatgatcgggtatcattaataaagcattgggcaaggaccttctcgcaattcctcgggataatttgtgacacaaaaggcgttctgtgatacaatggtctgttgacttattcaataacagaggaaacacatggattgttttaaaaaataaagccaaggaattaaacaaccaaacggaatatttcctttcaacaatgggaacgcacgctcagagtagggatgtgatgctattggctatgcataactagaaatgggaagttaatatggaatttctaattggggtcacatgctaatgaactccctcttcatgttagttttatgccgcttcagaaatcttttatcatatgcttaaaaatttatgggcagaaacattaatgaaaatgaggcgtgaattggaaatcgtgtcattatggagatgagggtggcccggcattgctgattttcaaggaggtatcttttattacctttttttgagaactgagaaatgatacaggtaaaattaatgacaaggcgtattctccatcctgacataggcagcatggttctatgtaaagttataaaagtttgattttaataagattttgaattaattataaggagaatattaatcataatggacagtcatttttcagaataaaacttcaccatctaagtaatattatagttcttaagtgcataaagataggcattttcttttttctatcggctttgtcttttcagaaattaaaatccactttttcagactacgatggattggaaagcctgggccttttcatctgtgaaatactcgctcgatttcagattgtacttaaaaagtacctctctttgctaagctcaggggacaggcagattttgtgaggccatgtttatgtggagggagccagtacagtcatattaaactttttctgtttttaatctctcagaaactattgttttcaatacatctgataaccgtcacatttgaatggattttcagaaagtcgttttgtggggtttctaagagttgtacttcacgcttatcacagcagggatgaaggcagaagttggaataaaatcttgtttctaggcctgatctcaagggagtatctttttttattttttattttttaccctctctcattctgtgtgcatttggacccaggtctcagtgagtctgtggcaaagcaggtctccctcaaggctgaacaggcaggcctctgtaacaactgttccagcactgactgagtggttacgttaaatattaaaagctgaggctgggcgtaatggctcacatctgtaatctctaaacttggggaggctgaggtaggcggatcacctgaggtcaggagttcgagaccagcctggccaacatggtgaaaccccgtttctaccaaaagtacaaaaattagccgggtgtgttggcaggcacctgtaattccagctactcgggaggctgaggcaggagaatcgcttgaacctaggaggcggacatgtagtgagctgagattgtgccattgcactctagcctgggcgacaagagcgaaactccatctcataaataaataaattaataaatgccaagaaagccagtgcccttaaacaaaggctgaaatgtaacaaaaaccccccaagagttttgcctaggcctttcctaggccttgaaacatgacaagataataaaggaattcttaacaggacccatttaggattaaacaagtgtattgggggtctgaagaaactccccaggtcttgagaaataagttttttgggtttctaaaggaactccccacacctccatgatttagcaggagacaagagaaggataatcatcccagcacctggacccatttagattaagtaaatttactgaggctgcagaggaaggtcttcaggcctcagatcttatagatgagaagttaatcacttacgtctttagacgaatgcacacttacaggtagacatatagcttagaagctgtataagctctggaaaactttctaattttaagttggtctggtgatatttcccaggccttctccctgtacccggttacaggaataaactcccttgtctcccagttctcgtgtatgttgttattgggccacgagaataagcagcctgaccctcagtttggtctgggaacaactcttcaggagtcacctctttcttgtatctgttcccctgtgcccttcttacctccttccaaactctgcagaggaggcccccgcctgccttttttcctgccttctctccttccttcctctgttctggagacaggacatactcttgcaggaccagcatctcctgtctctgacgggcccactctctgtactgtctctacctgtcaccactgcaagagggtacagaactcagactttgagctcttcaatcatcatatccctgactgtagggattggcccagggttgggtacctgacccaaacaaagtcaaagagattaaatgcctcaggtccgggtgcagtggctcacatctgtaatcccagcactttggaaggccaaggtgggcggatcacttgaggtcaggagaccagcctggccaacgtgatgaaactccatctctactgaaaatacaaaaaaaaaaaaaaaaaaaaattagctgggcatggtggccagcaactatagtccagctactcaggaggctgaggcaggagaatcacttgaatccgggaggcgggagttgcagtgagccgagatcatgccactgcattccagcctgggcaatagagactccatcacacacacccacacagacacacacacgcaaaagaaagaaagaaaaaagaaaagaaagattaaatgcatgggatagtaagctgataggatgtccctgagctgctgatggccattttctcagaacctggggagaccccaccagaggagaggagagctaagcaatgcagacagtcctggccatgcaagtggagcccctgggtccctgcgtccactccagaccgtgttcaaactgtagtaatttcccagcgctgctatagcaaatagccatgaacttggtgacttaaaacaacaaagattgttgcttttgttatcagaaaggggtcccgatcaagatcccaaaggagggttcttggaaattgcagaagaaagaatcagagcgagtccgtaaagtcaaagcaagtttattagacgagcgaagaaacaaacgaatggctactccataggcagagcagctctgagggctgctgattggctactattatggttatttcttgattatatgctaaacaaggggtgaattatgagttttctgggaaaggggtggggacttcctctggaggtgaggttccttcctcacctttagaccatatagggtagcttgtgattgtttcacggcgtttttaaattgtcatggcactagtgagagtgtcctttagcatgctaatgcgttataattaatgtataatgagcagtgagagcaaaccagaagtcactttccttgccatcctggtttgggtgggttttagctggcttcttcaccacatcctgttttatcagcagggtctttatgagctgtgtcttgtgcagaccttctgtctcatcctgtgactaagaatgtctaacctcatgggaatacagctcagtagctctcagcctcattttacccagcccctattcaagatggagttgctgtggttagaaggcctctgacactttcatgattctgaaggtcagaaatccaaaaatcaggctgtatccaggaccatatttcctctgaagtcttgataggagaatccctcctttctacttccaaatgctccttggtttatggcagaatgactccaactctgcttgtttgcacatggccttctttcctaggtgtgtgtcagacctccctctcctttctcttacaaaaagactagtcattggcccaccctaaattcaggacaatctcatcttgagatccttagcttaatgacatctgcaaagatcctacacattcataggtagcaagggttaggacttcgacttatctttttaggagataaattcaacctgctacaacctgtgcaactttttctgttacatatatgacatttcccctgataaagcagcctggtttaatatagccgcagtgtgtccctggcatcctttcttcttacttcagaagctcagaggtcaaaagcaccttaaagttcattcaattcaacctgttaacatgaggcttggagccaggagctcatgcctacctataatcccagggctttgggaggccgaggccggtagattggttgaactcaggagttcaagaccagcctgagcaacacagtgaaagtcagcctctacaaatagtaaaaaattagtcaggagcagtagcatgtgtgtgtagccccagctaccttagaaggctgaggtgaaaagatcacttgagcccaggagatggaggctgcagtgagctgtgatcatgccactgcactccagcctgggcggcagaatgagaccctgtctcatggaaaaagggaaaaaaagaaaagaaagtgagccttgggatggggtgatttgggtgggctggggtggggttgttggatcttgctttgatcgctcagcagtttgcatggcaaaggagaaaaagaatgctgactcccagccaagaatcagctctgtaaaccttggatttgaaacacagtcactgtgtgaactgcccaagtcaaatgctccaggcccaccttccctctcctttactgaggaagtccgagattcacctctgggtgcaggactctttggggttctggctggtagttgccacccaagcctagcactgctattttttttcggagtccgtcatgccataattttctgtaaagaggtagcatcaaaagcagcatttgtgttggcaaaaagctagcccatcttagggtctttcaacagtgacttttttttttgttgctcttgttgttttaaaataagtggggttctcagctttgagataatgggaatgaaatcgaacctctatttttagaattaaaacacacacacacacttgaaataaaaatgtgttgttggacttctaccaaatggttggtgacaacataagttatctcatgctgtctgaaccactggtcagtaatgagatacatgttagaggatctgatttgtttgcaaaggagtgaatgactcacttgcaatgtaaaatgtacattttggctgtgttctgtaggatttcaactataggccatcctagaaaagcaaaactgtggggatagtaaaaagatccaggggtgccagagattatgtgggagggagggatgaagaggcagagcatagaggatttatttatttattttattattattatttttttgagatggagtcttgctctgttgcccaggctggagtgcattggcgcgatctcggctcactgcaagctccacctcccgggttcatgccattctcctgcctcagcctctcgagtagctggggctacaggcgcacaccaccacgcctggctaattttttgtatttttagtagagatgggatttcactgtgttagccaagacggtgtcgatctcctgacatcatgatccacccgcctcggcctcccaaagtgctgggattacaggcgtgagccactgcgcccagccccggatttatttatttacctatttttattttcttttttcaacatgaagtcttgctctgtcacccaggctggagtgcagtggtgcattctcggctcactgcaacctccgcctcccgaatcaagcgattctcctgcctcagcctcccaagtaggtgagattacaggcatgtgccaacatgcctggctaatttttgtattttttagtagagatggggtttcaccttgttggccaggctggtctcgaactgctgatctcaagtgatgcacccccctcgacctcccaaagtggtgggattataggcatgagctgttgtgcctggcagcatagaggatttttagggcagtgaaaatactctatgtgacactgtaatggtggatctgtgtcgttatatattggtctcaacccacacaatatacaacatcaactgtgaactttaatggaaactctgctctttgggtgattgtgatgtgtcagtgtatatggttatcaactgtaacaaattgcacctctggtagggggttttgttaagggtgaagctatgcctgtgtggggccagtgagggtatatggggaatctctttatacttgctgaattttctgtgaacctaatactcctctaaaaaataacgttagtttgaagaaaataaaaatacattttgacaaactcattccttcccaggatttgcaaaagctgatatcacaaagggtgtctctgatgaggtaaggtccggaagcacttgtccctgcaattcctgttggagagcctttaagaacttctcagcagggctgtttgaaaagcttaaagctaagaaaggcctttgtctaaaagagcctggttgaaatccctgctcccagctccttgctgtgtgaccctgggcaagtcactccttaacctcctccctgacttaagccaggctaatccccatctctgcggattaaaggagataacagacgccaggcacttagcagcgagtgtggcctatcctacgtgcttcataaatgatggtggaaatgattatgattgttgctttattatctctaggttctcctccttccctggagtctgggggtggcagtgttatgtagcttcttcctaggtcatgaggtgggtttatctagactctgcctccatggttctcggggccaagggcaactgtactgctgcagattgctgtggtggtagattctgggagaggtgggtggtgtaaatcactaatgaaaaggaaagcattgctttgcactcatttgggtgtaaaaaatggagaattcaggactagaatgaccaaacataaacaaatccaatttcctttttcttttgttgtgtgtgtgtgtgtgtgtgtgtgtgtgtgtgtgtgtgtgtgtgtatgatggagtcttggtctgtttcccaggctgtagtgcagtggcgtgatctcagcttactgcagcctcccgggttcaattgattcttctgcctaaacctccccagtagctgggattacaggcgtgcgccaccatgcctggctaatttttgtatttttagtagaggcagggtttcaccatgttggccaggctggtgtcaaactccggacctcaagtgatctccccaacttggcttcccaaagtgctgagatgacaggcatgagccactgcgcctggctgacaaatccagttttcactgagttctggaaaatgtgagtccagtgactatattatctgaacttaaaaagtagatgtgattggctccaaatgggaatgataataatcatgtttattatcctggggtgctttctccatagcaagtactcacttaggtcctgttcattagtcagtcttttaatctgtactgaaataggtgctgtcgcatccatggggataaggaaactgaggcatggggggattaagttgtttgcccaaggaaatgccgggaaatagtagcagagttggcatttagcatcgggggatccagtgccaggtttttaatggattcacttagggctttggaatggggagtaaatgctcaaaatggagcgtatcatagaaaatcggagatacgttttcttatcttagaaataagaacctggactttgaaggtagtgatttttactctatcacggggttctcaaccatagactgggggcctaaaaagcacataaggcatggttccactaaaaggagacatttacgctcttgccagaggcttcctatctctctgagccagctgccttcccctctctgtcccagcttctcacatagggccacatccagggccaaggagggtaaaatgagcctcccgttgactgggcactcctgcaggcactgaggataaaatgggagtgaagggagagcaagttttggctctcagagcacacacagtctagtttgaaagaaataataagtcatggcaggacagccaggaggaaggggtacatgaccctggggggtcttccagaggtccctgggcgaggtggaggggtgagctcattctgccatccacggagcatgatcacagtagcttattaggtggcgagaggggcggacgggggaagactgagagagatggatcgagttatgcaatgtctttgagaaagaatggaagatacgttagttaaaaataaggccaatggactggagaacatggggtcacagagcaagaggcaaggtggaatgatgttgctgttaggcatgagatagtgcaagctgggctgaagtgaagcgaaattgatctaaattacacctgtgatgagaagtcactgtaactctgcctgcctctatctgtctgtctgtctatctatctatctatctatctatctatctgtctgtctgtctgtctgtctgtctgtctatctatctgtctatctatctatccatccatctatccacacatccatctatccatgtatccatctattcatctctccatccatccatccatccatccatccatccatccatccatccattggcctacctattatctatttgcctatatagacattcatccatcatctacttatacatccctcttttatttctgtatgtacctatctacttatctgtacgtgcatccaccctccatctatccatatatctatacattcatccacccatcattctatttgtctatacactcattcatccattacttatctatttaaacattcatccattcatcatctatccatgtgtttgtacattcacacatccattttctatctatacattgatccatctctccatccatcatccatttgtttatacattcatctaccatctgtctgtctgtacactcatcatttcatcatccattatccatccattatttatgtatggatctgtctatacatccatccatctaccagcagtggggttggctctcatgttccttgagcagggaagagattagagggagctgaagcctcatgggaaggccagttgaagccagttccaaaaagtaatgacatttggagctaggattaggatgggggcagtggataggataggagcagtggatagacgttatttcagaagaaaaacaggaaccctttcatttgctgaatagactgacttgcttatgtgtttctcctacacctctttacatgtcatcagcttctctagttcaccctgcccctcagtactcagtacacttcgctgttgaacagcgaagtgtgtgttcagtaattatattgctcttctaagggcctggttcaagacattgaacacggtaggtccttggtcaaatgggtcttctttaattgtttgtgcccatctgcccgtgcagctgtgggaccctggggaatgtgtgggaggcagcaggtgaccaagccctgaaactaagaatgtaaggggacagggtttagaagcaaccagacatacttcctgaagaattgggttgtcagtctgaaaaaagatgccccaaatcactgctccaattcctcccaccaactgttcagctgccccgggtgccagaaggataaaaacgctcggggagagaggttggcagttctgctgatgacagcgggaaggtgctgcctctgctcttgtaaggaagccatgtgggctcacagtgctgggaggtgcttgggtctgaccctcggatgcatgagagagccactggaatggatctgtggctctgaacttgcaaccccgcacagacaccaccgctagactcggcctcagggtgggaaccccctctccgtgggtgtcctttagctctcttttcagttcagagtgactgacaggcttttctctggttggtgcctttaactcagcaaagacccccaggcaagctgtcacttggagagaggatatttgaaaagcagcctggtgaaattagcagcgatggaaacaatgcaaacatttcatttcttttccttcttttttcttcacttatttttcctccttcatcaggcattttaatactgtctttttttcctggtctcatctcacgcagctgaaataaaagcatgctgcctgacgctatccggaccgaaaaactgaggcttctccctgctttggctgaagttctcccatagccgtttcctgagagcagtcttaaagatttagaagaggaagtctggcagggaaagtctcagaatgatgtgaaggtgtagatgatggattcctcccatcctgtcagtttcagtttgcatttacacaacgtgccaccatcccacaggactcgaggaagcccacaaggtgctggcctcccatcgagtacacatactaactcctgttctcatggcagctggcctcatctccctcctctccctcctctttgcctagtaccttgtaaagtagctgattaccttcattagctcagaatgtattaatccaggtttttttgtttttttttttttaaagaaaacctgcaggtcttctggcagctgaaggctactcttgactcttggctctgtgtcaggattcacataataagctcattagaggaaagttcccagtcccacagtgaccagattagtgggtgctcaggatgtgtactttgagggaaggaagatatctgagcaaagtcagaatgttagaatctcccactttttttctcctgtagttaatacagttcccatccgagaggtgtcaagagcacttacaggagagaccttctcctaatgcattggttaagagtactgcgtgtgaacttattcagtccacttttagctgtctgtccccaaaataggtaacttaacttctcttaactcctcactacattcccagtccttcacctgttatgtgagaatgataatgaagttcttgggaagaccttggagattatggattttaaaaatgcttaggcagttactcaacgaatcctatttagtgcggggtcaggattagggtgcattgagggaggcagtgtcatgcagtgattccatatttaacttaaaaatttggatattttgttcatgatgcatatttcacaatgaataattgtgattttgtacaacattacattcaaataaggtggccgggtgtggtggctcatgcctgtaatcccagcacttcaggaggccaacgtaggtggatcgattgagctcgggagtttgagaccacactgggcaacaaaatgagacctcgtctctacaaaaaataaaaataaaaaaaaaattagttgggcattatggtgcatgcctgtagtctcagctactcgggaggctgaggtgggaggatggcttgagtctgggaggcggaggttgcagtgagctgaaatagtgccacctcactccagcctgggtgacagagccagaccctgtctcaaataaataaaaataaggtaacgtatcttaattgctgagctctctggtgcccccttcagttgtgttgcctcatcctcgttctggccctaattctgagtgtcagccatgtgtgaaccattgtactaattgatgggtatgcaatgttgtgtcacttgagactctttcagtagtctgtcatagatttcccacatacagaaatgtcacacaataaggacacgtgttattttatgtaatataaagtccttacaagcctgggcagcatagcaagaccccatttaaaaaaaattagatgggcatggtggcatacacctgtagttccagctacttgggaggctgaggcaggaagatgatttgagcctaggggttcaagactgaagcgagctatgatggtgtcactgcattccagcctgggcaacagaacaagactctggggggaaaaaaataaaaaagaaagaaacaaaaaaccccaaaatcaaaaacccatgaaaaaccaaaaaaaaagtcttaacagaataagaaggcagggtactttcaatgacccaacaacatcatcacctagactatttctgtcctttcattttctcagtatagtggtttgacacttaggtttgtcttttctcagttgcaagacaggtagtgcagttcccttaatgtttcactgacttagtctgctcaggctgctacatcaagataccttagcctgggtaatgtatcaacaatgggagtacattgctcacagttctggaagctgggcattctaagatcagagacatcagtagattcagtgtccggtgagggctgagtctctgccttataactggtgccctggcgttgtgtcttcacatggtggaagggaaaaagcactccctcctgcctcttttggaagggcactaatcccatttgtgagggctatgacctcatgacgtaatcaccttctaaaaatcctagctcttaatactatcatgttggatattagatttcaccatatgaatttgtggggacatatacattcagaccatagccccctttaacctgaattgggtcttatgccctgtctacaaaggagactggcaaaagtgactacttggaatattcagcatcaatagaagaaagaaggctgtgctagtaagagacaactgcagtaaggctcaaagacctttgtgctgtgctgttccatttgtctgaaacacatgcacacaggtgcacgtgcatacctacccatttcctcctgcccttatttgatcatagaatgtttaacagtttccttcaacagatatttcttgagaaccatactatctaatctgtccaagacataatgatgaaaaggacacatgcgtttcctgattggatggtagttataatctagcggaggaagacagacatttgacaattgagtgggtctactaatacataggaaggaaattattgggaaaaagtatccgctatacagagattttaaaatatagaaagaggtgtgctaaaaggcagctgaattgttatggggatgggattcttctggaacaccttggggattcatatgtaagctgagataggaaagcgaggacatgtcagccacagaaacatccatggaagagcaatccaggcagcaggaacagatgactcagcctaaagtggggagtgtgtttgcttgtttggggagcagaaagggaagggtggtgtaagatgggtttggaggggttggcaggggtcccgcagtgcagagcttttcagattgcaatatgaagagagagagagagagagagttggtgtgtgtgtgtgtgtgtaccactggagaattttgagcaaaagaaatgtgttcccagtttacattattaaaagatcaccagctgttacatggaatatggtgtactgattgggggcggagaatggagtcaaacattccaattaggaagccattgcaatagtcctggatagagatgactgttgttggggttagggtgttgttagcagacctgtgggagtgtggacggattggggacatcgtggagatgtcacttaagtggagtgtccacagtcctgcttctgttgggtgtggagggcgagggaaataggattcaaggctaagagcagagaagtgtctgatggaagagtctaattccctgcagtgatccgctggtaccctttacatcagcagcctcagtggggtggtgagatgggaactggaccgacttgagatgcgggagaatgtgaatgagcatggagtccgtgccacaggcaatccctgcacgcaagttttactgtgaagtgatatagaaagaagaggggaacagagagggtcaaagacttttgtttccttaacaaagagatatattacagcatttttttcccattgtgctaaaaagcacacaacatctaaccatcttaaccatttgtaagaatatagttcagtagtgttcagtatattcacgttgttgtgatagagatcacgaaagctttttcatcctctaaatctgaaactctgtatctattaactctgtaactcccctttctccctctccccagcccctggtaactgtcattctactttttgtctctatgattgggctacgtttgctaccttgtatcggtggaattatacagcgtttctcctttcgtgactggcttatatcacttagcataatgtcctcagggttcatccatggtgtaggatgtttcttcgtttttcaaggctaagtaatattcccttatgtggaatggatacattgtatttatccattcatctgtcagtggacatttgggttgccgccacttgttggtgtctgaatagtgctgctttgaacatggggatacaaatatattgcagcagatttttatactgattggaatgttctgggagaagtggagacattgatgatgcaggagaacaagcagaaaatttcaagagcaaatgctttggggacagacaacctgagtggagggctggccttgatagagatggaggcagaggtggtctcatgcgaaagtataagtgggagactccaggggaaacacaagggaggctgggtagatttgatgtcgagtgggtaagaaaatttctgttcaaattcatatttttttcaataaaaccagagacaaggggccggatgcagtggttcatgcctgttatcacaacactttgggaggctgaagtgggtggatcacttgaggtcaggagttcgaggccaacttggccaacatggtgaaaccccatctcaactaaaaatacaaataaaaatagttagcccagcacggtggtaggcacctgtaatcccagctacttgggaggctgaggaagtagaatcagttgaacctgggaggtggaggctgcagtgagctgagattgcactactgcactccagcctgggtgacggagcaagactccattgtctaaataaattaaaaatttaaaaatagagacaaggccatcagctttgagagagtgtgtgtgtggtggtggggggcggggttggaggatatcaggggttcttccccattaatagcataaatgattaacagtaagtacttggaatcaagttgatgcattttcttatgtgccatgcagacaaaataaagctcagctttgttgtcagacaaaagcagcacttattacaatggttggcatttcagagataattcaactataagagataataacacatcagtcaatcaggaagcattcttcccagtgatatcaacagaattacatgcaagtaatagactgttgtggacccaactaggaattttcttttgctgaaatgctcctatttctaggagaagctcaacgttgatttttcagcttctgtttggagagtctgtttatttctttcttcccgaggggattgtaaatggtgaggactttttattgtttttgacagttatcaaagaaacattttttttaaagctggaccattgactgaaaaataaacccatttgggatttttcgagtaaagtgtgttgaatcatgtttgtgatactcacttttaagttttggcgagcataactgcactgtgttacccattaaccggtagtttttaatttttatttttttaagttccagggtacatgtgcaggatgtgtaggtttgttaaacaggtaaacgtgtgccatggtggtttactgtgcctgtcaagctgtcatcaacgtattaagcccagcatacattagcttttatccctaatgctcgtcccctccatctcccagcagaccccagtgtgtggtgttcccctccctgtgtccatgtgttctcattgttcagctctcacttttaagtaagaacatatagtatttggttttctgttcctgtgttagtttgctgaggataatggcttccagctgcatccatgtccctgcaaaggacatgatctcattcctttttatggctgcatagaattccgtggtgtatatgtaccacatttttttattaatccagtctatcattgctgagcatttgttttgattccatgtctttgcttaatgggggatagttgtaacccctatgaatgcagagaggcatgtggtacagtttgagttggtgtcattttagtaaataacagtccagtttgtggtgatataaatcacatttttttctttttcttttttttttttttttttttttttttgcgatagagtcttgctttgttgcccaggctggagtgcaatggtacaatctcagttcactgcaactttcgcctcccaggttcaaggaattatcctgcctcagcctcccaagtagctgagataacaggtgcgtgccaccacgcccagctaattgttgaatttttagtagagatgaggtttcatcatattggccaggctggtcttgatctcctgacctcaggtgatctgcccacctcggcctcccaaagtgctgggattacaggcgtgagtcactgcacctggcccataaatcatattctttatttgcatttctggaagaccatcaggagggtagtaacatttattaaatgtccctttccatatttttcttatctcttaactgaaactcaccagaggcaggcaccagaaaaccccctgtgtttgcaaaccttgatgaagtttgccagtcactcccttggcttgtagtccttttacttccattttactcgcattcagtgctccctggaaggtgtttctttctgcaaatagctgcgtgagaaatccagcatgtcctggaccctccctcttttaaaacacttttttaaaaggattgttctaaaagaatcttcctctgcttctgcttctaattctggaagaaagggtggagctaggtgtgttcacatggtagtactttttcttttgatccaattgtttaaaaatatatggcagaataaagaggacgggaaaacctcaacaacacctcaggagtcagagagcagaggaaggtgtttcactctgtgcagatcctggactagctctgtgggttcctgtgatggtactgaggtaaagagagtgaagcatctgcccgacgcacagaatttaagaggccaccacaatactcaaccaagaagaaatcatgtcctttttttattatttttttttttgagacagggtctcattctgtcacccaggctggagtgcagtggcacaatatcagctcactgcaatctccgactcctgggttcaagcgattctcctgcctcagcctcccaagtagctggcgttacaggcacataccaccatacccagttaatttctgtattttttagtggagatggggtttcaccatcttggccaagctggtctcaaactcctgacctcaagtgatctgcctaccttggcctcccaaagtgctgggattacaggcgtgagccactgcacctggccgcaagtgcccatatgttgatagcacctgggagaaaattgatcaggtgtgtttttcccacttgacagatgaaaagactgagccacatgatcagaatttcagcccaagttcataaatatcttcccttggaacatcaatttatgattagcactgctcatatgctcataggctgaaagttttctactcctatgacccctaaagtgtacttggtgggtaattaggagcttgctgagtgaataaagataatggtaatggtaataatagtaataaaaataaaactagctgggtatggtggtgcacacctgtaatcgcagcactttgggaggctgaggtaggtggtcacttgaggtcaggagttccagatcatgctggccaacatggtgaaaccccatctgtactaaaaaatacaaaaattagccaggcatggtggtgggcgcctgtaatctcagctatttgagaggctgagggaagtgaattgcttgaacccagtaggtggaggtttcaatgagccaagatcgtcccactgcagttcagcctgggcgacagagtgagactccgtctcaaaaaggaaaaagaaacaaacaaaaaaactagcattaactggtgctttgctatgatttctacaggagttacaagagttcttatatgagcattctaattattacataggggaaactgaggcacggggcagttaagaaactcacctgtactgagaacaagaatttgaacacaggcattctggctttagaggccacactctaaatttctcctctatccttgttctagcattcagtcctatccatgaatacatgaagcaaatatcattttcagaatccagtttccagaggcgagcatgttttatacatctgtggctattggttttgttccaggaaaggggtcctgatttagaacccaagagggggtttttagatctcacaccagaaagaatttggggtgagtccacggtgcaaactaaaaaagcaagtttattaggaaaggcaagtggtgaaagaacagctacttcatagacagagtagggcgttcccgaaagtaagaggaagaacgcatccaccctaggtacaatgtttatatatatatgatatatatatcatatatatcatacctatagcatacatatcatatagcatacatatcatatatatcatgtatcatacatatatatcatgtcatacatatatatcgtatgacatatcaatatattatatatatgatatatgagatataaatgatctagatcatatataatgtacctatcatatgatgtatatcacatatatatcacatatgtcatatccatatcacatatatggtgtatatcatatatatcacatatattgtatattatatatatcatatactatatatcatatatattaaatatcctatatcacatatcatatatatcacatgccatatattgtatatcatatgtatcatgtatcatatatatcatatatatcatatatcatgtatgagatatactttatcatatatgatctatattttatatatatatcatatatatgatctatattatcatatatatgatatatattatatatatcatatatatcatatattatcatatatagatcatatatatcacatatatatgttttatcatatatattatcatataatcatatatgatttaaaaagatcttgggcagatttgctctgctacaagggtttgtgataaaggattaattttcttaattattgtgttttgcaagaattgatattatgatctttgaagcaaaattaggaatgcctttgttctctagataccgggatatctggacactcgcaagtctggttctgtttagcaaacattatttacttgttcccttaaccatacacatctagaggccaggaatgcctgacttcctgagaatgcagcccagcaagtcccagcctcattttccagccctcactcaaaatggagtcactgtagttcgaagacctctgacaattggacacacgtctgtggttcctaactcaggacagatggatttctgtggactccaagcttccaaacggcaggcccccggctggtcatctctttagctctggcactaaccgagtgccaagcacattagcacttggtgaatattgattgaaatgaattgaaattgtgggtggaggaaggctgaataaaggccatttctctgaagaaaagaaagaaaaagaaagtcatcttatcccgtagtcagtgtggattgcaggcacctttggcttatttgcagtatcttgaaaagctgcttcccaatctggtctgagagaaacacgtgagctgaggggactctctagggagatcccaagaggaaactgcctcttccagcctccccagggaaaaaaaaaaaaaaggcaaacctcctttcccaatgtggctgaatgtgtctttgcaagacactcagcattcttgtgtgtttattttctgggtcccccaagccccgccctccctctaacctgccccgtaccccgccccccttcatgtgggtgtcaattacagctgactttgcaggctccagccctgaacacaacagccgggcatgatgccctgggccccatggcatacggcagtggaggtaattagccagccttgactgggccctcggttgcagttcgaaatgcttcttgaaaaacaagtttctagccttggagagcgtggctttgtacttgatagatgttctgaatgtctttattgtggtactatgcaagaaattgggattcttttatcccggtgctctattttgggctggtctttataattagatctaattactcatacagacgtcatgaggacaatgacagctacctcaccgaacacatgatatctggaagaatagttataagcccttggtgcatatttacttattacgttttcattacaggtaggttgtattattatctccattttacagaaagggaagctgaggttcatagaagttaaagtaactcactacagtcatagagcccctttctcctttctatattctgggtattaccaggttgggtgccttccacatattttctcttgtaatcgttttaatgtcctcatgatgattttgttgtccctttcttaccgacttggaagctgaggttttgccaatgtaatcaggatgtgataaatctcagagtaagtttggaagaaggattcgaaccccagatttgaaccccagtggcctgattctggagttcatgctctgtggctacaatacattgcctatatcgggtaacaaatgccttcaatccccttcgcgcagagctgcttcattgcatttttgccctgatgatgctttcggatgctgcagagtgcattggaagggcacagaggcctggggaccacacccatcttggtggagagccccaggctgccacctgtgctaaggcaggcaaactgttgactctttctgacatccagatacaacttctgaggagaggagataatacaaaagttattatgaaagctagagagaatctgtataaaatagcaccaatatgttcaacatgatgattatgggctcagataaaattgtaccaaaaatcagacctgaattcaaatcttagttctagtgttgatagtattcaggaagttgaaaggttatttaaatccccaagtctcagttttcccacctgtaagaggtgaataagagaaaaatacagttaaatagtaaaaaccttagaggattctatggggtcctgtctgattaaacacgcaggatataatagcattcagttgagggtagctattagctatcagtgtaattatgaaaacattagttgaacctgagcactttccattgtgcgatagacccactaaattaaagttgaagaaagtcctttgaacagaagaaattacagtgatttacagcatctgttcttcccccagtacctttctattgattgaagggctgtatgttgtagttaattaaaatgaatatcttcaattggatacagcaatgcttttgcaaaagaagagatagcaggattgcagcacagtacaggggtgtgactctttcattcacagtttggggagctcagaactttcttttgggttgcagaaataagttatgtttcaatagaattcaaataaataaacatgtgaggcgttattatgcttataaatttgaaggctgtgatcattcctcctaaacagtggatgaagattttctaaaaatgcaaaaatcatctcagtgggtattccacccttttctcctgcctacagaaatgccagatgcactcaggctggtgttgggctctgtgatgtgtttgctttgtgagcctcctgggcatctaggtgtggccacaggacaagatcttgtcaaagagatggaactgccagtttctgagaggtctctggggaagctttcattttcctgttggagtgggtaccttctaacaccgtttctccttcccagccttaatggtgtcattatagtgttaacggtggggctacagaactggatatataaccgcatggcaccttgaccctggtgttagagtgtagtagaacagtcacagcacaggctggacgtatgtcacctgagaaccttaatccctcttcaattaagcctccgcagttaggatttctattatttgcatccaaaagcaattctagctgatataacttgaaaaattaccgcaaaattttatttcctatacaaatgtgctgtgtcaggtgtgagtgtgtgcgtttatgatatgaacaatagttcttccgttaaatattacctattcgttttttgttccagatgaggactaacatgtaaccatttcttttgttttctaatcttatctttttccttcatgagagtttacttgccattttcaaacacagaaagatatgtttacaaaagcaaaaaacttgtcttcttatgttgaaatttttctggtgtttgtttgcattcctaggcccactggttatccatgaacagaaaagtgttttccaagctaacatttgacatgagaatcaaaagcgagtattgaaaaacagctttaataaaatggaggtggcaggttttagctgaaaaactccaattatcagaaggtgttggtatttctcaaggaagaacacaatacagctaaatttctgactctcccggagataatttggagggagcaatgtcatcaaaggagggcagattatatgtgggaagaaaatgttcaggaatggagcaggtacagtagctcatgcctgtaatcccagcactttgggaggccaaggcaggcggatcacttcaggtcaggagttcaaaaccagtctggctaacatgttgaaaccccatctgtactaaaaatacaaaaattagctgggcatggtggtgtgtgcttgtaatcccaattaatcgggagtctgaggcatgagaatcccttgaacctgggaagtggaggttgcagtctgccgagatcacgccactgcactccagcctgggtggcagagcaagtctcagtctcaaaaaaaaaaaaaaaaacactaaaaaattcaggagtggtgagatccagtacttttccaattaagtaaactctttttttatttttttaattttaaatttacaggtacacttgcaggtttgttgcacagataagcttgtgtgatgggggtttgtggtacagattatttcatcacccaggtattaagcctagtactcattcattgttttttgtgattctcccctcctcccaccattcaccctccaaaaggcccctgtgttttgtccccctctatgtgtccatgtgttctcattatttagctcctactttacttttctgtttctgtgttaatttgctaaggataatggcctcgaggtccatccatgtccctgcaaaggacatcatcttattcttacttttggatgcatagtattccatggtgtgtataaaccacagattctttatccagtgtattagtctgttctcatgctgctaataaagacgtacctgagactgggtaatttataaaggaagaagattaaattgactgacagttccacgtggctggggaggcctcacagtcatgatgggaggcaaaggaggagagaagtcacatcttacatagtggcaagccagagaatttgtgtagaggaactcccttttataaaaccatcttgtcacatgagagtcagtatcctgagaacagcacatgaaagaccagccctcatgattcaattatttcccgcctggttcccccaggacatgtgggaattgtcagagctaccagtcaagatgagattggggtggggacacagccaagccatatcatccagtctacactgatgacatttaagttgattccacatcttggctattgtgaatagtgctgcagtgagtatacgcatgcatgggtctttgtattacaatagaactttttattggcacatgaaaatacaaataagcctccaaatagtgtgtaatacaatttctttgaaccctcgtgttttaccttacaaatttatgtaaaattttcgtagtttttcatgatatactcatgttggtttatataacaagaatgtggcccccgcaccaatgactaaaccaaattagtgatacgaagagttatccatgtttatggtattggattgtgtattctctggcatccaatttgagaaacctgagaatggtcctgtggttggctatcaggtacccggggagaaatgtagctgctttcaatttgaaaacccttttccaggtaacaaagattgacctacattattccattttgatctttacagaaacccattcccattgttggccagcatgtcattttgacttttgttggttttattagtgagaacactgaatatcattccagagtcagggctctgatcctggagcatcagtcatgtctacttaagtcctttcattgcagcgagctccttctcattcgttcatgagagtcgttgacgaggtggatcctggagtagtctcagacggcctcgccctctgttcatcatccttttgatggaatctccctgttagtagttccaaatcatagttaccatgagttgaacagttgtttgtaccaggagctgagcaaagccctttcttgcacattgtcacattgagtattcacagtaaatgtaagaggtagatttactgttatctcattttgaaagatgtggaactggccaggtgcagtggctcatgcctgtaatcccaacactttgggaggtcgaggcaggtggatcacctgaggtcaggagttcaagaccagcctggccaacatggcggagccctgtctctactaaaaatacaaaaattagctgggcatggtggcggatgcctgtaatccaagatacttgggaggctgaggcagggagaacaacttgaacccaggaggtggaggttgcagtgagataacatcatgccattgtgctccagcctgggtgacaagagtgagactctgtctaaaaaaaaaaaaaaaaaaaaaaaaggaaaggtgtcgaactgaggctcgagcattttggtaagttatctaacatcacattactggggagtggccatgctgagacatgagttacagttttccagataccaaaactcttagctgttccattgacagcttcctagcagggatagcacaccaagcctctaccctttccttgggtagtactcatcctctgactctgtcacccgctttatcctcttggtgatggcagagctacttggaatcactagtaactgcattagaatgatgtgcagttgtctatccaatgagttttgtccattatttctttagccgtaaataaatgaggaaagtacagaattattggtggggggtggtctttgaaaaagctagggtgggagaatatcgagaatgatataattatctatttgctgcttctggtccgccgacttgctggctttttttttttttaataggattatggaagatgaaaaggaagcgcttacttcagcttataagagcaatgtaagcaattttgcattgcactcactccccaggggtggtgtgaacatgtttctagtaaattaaagtatcataaaagcattggcaacatggcaacttttatattaatttcttaatttttcgcaggcttaattataaatctcttgggagaagaggcaaggcctgtcggttcctgggaaaacagtgttgcatctctaggcttgaaggtctgctcttctgctcagaagtatgtgtgctgtgatgtaggctgggtggctgctgtaggttgcatgcactacttgtgcctagtgatggtagtgatgccctgtggacaagacattaggctgggaggcccatgcatgcagccaagtggagagagtgctcttggacaaggtgttgtgtgactcttagcatgtagtaatgtgtcataagagcacagtctctgcagtttactaagtgtaaaatcctggatctggcctggagtggtggctgaaccctgtaattccagcactttgggaggccaaggtgggcagatcacctgaggtcaggagttcaagacctgtctgatcaacatggagaaaccctgtctctactaaaaatacgaaattagccgagtatgatggcaggcgcttgtaatctcagcaacttgggaggctgaggcaggacaattgcttgaaccctggaggcagaggttgcggtgagccgagatagtgccattgcactccagcctacgcaacaagagtaaaactccatcttaaacataaaataaaataatcctggatcctcctgtactacctgtgtgacctagagaaatttgaccagccctttgatctgtgaaatatgatggtatcaatgtcacctgggatatgcatgaaaaagcctacatcctacagcactactgagcatcctcaccagcctaggggtatctccagtgagacgaaccatcaggaaaacaatatatatccctatggatgaagccactgttaggcaggttttgttacttgcagcctaaagtctcctcacctttagtagtcactaaattagaatggtgcagcagcccattgagttccggattcactgaatgatggcatatttatgctggacagaatcttagctctgcccagtgagtttaccacatgccttctttacttaatatttttattattattttgagatggagtctctgttgaccaggctggagtgcagtggtgtgatctcttctcactgcaacctctgcctcccaggttcatgaaattctcctgcctcagcctcctgagtagctaagattagaggtgcatgccaccacacctggctaatttttgtatttttagcagagatggggtttcaccatattggtcaggctggtcttgaactcctgacctcagctgatccacctgcctcagcctcccaaagtgctaggattacaggtatgagacattgcacccggtaccttctttacttacaaatctactgtaaggaaagtgaaaaatcaggagggagggctccttgaaaaacccagggggaaatatcctggctttgctggccagatcccaatgagttagttcctctggatttcatttctcaagattctggaatttcctctcccctctccttccttcccctaccctaccctaccctaccctaccctcttctttcctctgcccttctgtagcatagtatggtttaaaatgtgatcacattctattttaatcatggaaagatttttttctctggcctcttgtcttttctgggctacatgccacatattggtagggaatatatcttatgtttttacatgtccttcaattaattttgaaatattaattttatgataggttaacttatgctgcacacacatacatacacaaaagatatatggtcttataaataggtatggctggacaaggtgactcaggaggcttaggcaggaagatcacttcagcccatgtgttctcagtctagcctgggcaaaatagctagtccacatctcttaaaaaattaattaactaaagaacactatgtgtggaaaatactggattagaaagattagacagggctgggagcagtggctcacgcctgtaatcccagcactttgggaggccaaggtgggtggatcatttgaggtcaggagttagagaacagtctgaccagcgtggcaaaaccccatctctacaaaaaatacaaaaaagaaaattagccaggcatggtgtcaggtgcctataatctcagctactcaagaggctgaggcataagaattgcttgaacccaggaggcagaggttgcaatgagcttagttggtgctactgcactccggcctgggccacagagcgtgagttcatgtaaaaaaaaaaaaaaacagaatttttttttcttttttctttttcttttctttttttgcaggacttctttgtatctttaatctgcaaatgaatgtgaattgtaaatctccatggagtgatatagaataaggcactttccaaacttaccggacgagagaaattttttttcataaaacatcttgcagaaactcactttagagaacctgcatatctccaatttttaaatttcatttgtctttttaaaaatgtgcaatattttttcaactttttattttgaaaaattctaaacatgaaaaaatgtaagacttgtacaataacccttatatacgtctaccagaatcaccaatttctatttttatttatttatttatttatttatttattttctgagacagagtcttggtctgtcacccaggctggagtgcaatggcatgatcttggctcactgcaacctgtgcctcccgggttcaagcgactcttgcctcagcctcccgagtagctgggattgcaggcgtctgccaccatgtctggctaattttcctgtttctagtagagacggggtttcaccatgttggccaggctggtctggaactcctgacctcaagtgatccccctgcctcagcctcccaaagtgctggtattacaggcgtgagccaccacgtccagccccaggctggttttgaactcatgggctcaactgattcacctgccttggcttcccaaagtgctgggattgtaggcatgagctcctgggcctggcccagaatcaccagtttttaatattaaatattttttactgcatttgctcatcctctgtctccctcttttccttcccttcctctccctccccttctctctctccttctctctgtctttttgcaaattcttgatgggtatcttttcgtgacaagaaagaaggtggtctggatgccagttgcctcctccacttgcctttaagaaaataactgaacacgctgtagggcaggtgcctgtatgtttcacttgtcttggttgatgatttattataatcccatcttagaatcctagaatctcaagttgcagagggacctgaaaggttatctaatccaccccttgctcacctgcccaccccgcctgcattccctacccatgctttcgaatgccatttattgtgtttgccagggtttgttggttagtccattctgagtggaatgaaacttgcaaataaggccttgtggagagcctgccctcttcctgggcatcatccaagcgatctattagcagcttccatttatcagcgtcttgtgtgggtgtagtgggcctaataatgggagctcagtcagagagcagcattttgatagaggactgaagtgttttgccaagtcttgattacccataataacaagaatgaaaactttggccctggttatgcacagatttattgaatcatggaatattcatgctggatggaatcttaggatcatctggttcagtccctgaagttttcaaaggaggaagtgagtggagaacaagagagaatgagtagtttgcctaaaatctcatcactaccatggtttctgattccaggcccaggttatctcccgagccactaggcttatctcaggacagcaacagaaaacttttcagacacacacacacacacacacacacacacacacacacacacacacacacagaggcatgccccacacattgcaaacataatcatatacacgggcacatctatacataagcataggtgggcacaggtgcacaaacttacctgcaatctcattcataaatggaatttccattccgttgaaatatagctcatgactggggcctccactgacctgcagttcacaatctagaagtgtgaacttggaaatagaaactcatccaaatacatgaccacagtttattcacctgtgtggtgcctcttgcagatagcagaggggaggagaataagaacgaacattgtaaggctgttgggatgactggtccgtggagtgacagaagagattagaaatccaggtttattgggagggcatctcaaagcagccacattttatccctattcgggtcagaaatgaaatgtttatgatggctggaatgagatcccacaggaaacttgagtttactaagtgccagctaggcagtctttccttgcataatcttatatagtcgtcatcatggttatgtttctggtgaaaaaaaaattagatatggaaatgctattagttaccccacattccacagccagtaaatggtaaaaccaagaatcaaatgtggatccagagagcactgagaacataggaatacataaaaaagaaaacgcatttcaaagagaaacacagcagagttttagaagtgtcctaatggtaaatctccccctaaatttttggaaacaaatttgcattttcctgctggtttttccaggcaggactttctcctctcagcaaagccctatagacctttagagcagtgtagtctattggagtttcctgtgatgatgaaagtgtttataatcttactgtccactgtagtagctactgtttacttatggttattgagtgagttaagatatatgctggatttcaaagacttagtatatgaaagtgttttaaatagctcattgagagtttttaaaaagtcgattgcctgttgtgataacatattgggctaaatatatttttaaaattagtcttacctgttttattttttcttttccctttttattttaatttaactttatttaattttattttattttatttatttgggaccgagtcttgctctgtcccctaggctggagtgcagtggtgcgatctcggctcactacaacctctgcctcagcctcagcctcagccttagcctcctgagcagctgggattacaggtgtgtgacatcacacccagctaatttttttttttgtttgtttgttttttgttttttgttttttgttttttgtttttgtttttaagatggagtcttgctcattgcccaggctggagtgcaatggcataatctcggctcactgcatcctctccctcctgggttcagtgattctccctgccttagcctcctaagtagctgggattacaggcgcccactaccatgcctggctaatttttagttgagatgggttttcccatgttggctaggctgctcttgaactcctggcctgaggtgatccacccccctcggactcccaaagtgctgggattataagcgtgagccaccgcgcccggcttttttggtatttttagtagagacgggatttcgccatgttgggcaggttggcctaaactcttgacctcaagtgatctgcccgcctcagccttccatagtgctgggatttcaggcctgagccactgtgcttggcctctttttccgttttaaaatgtggctattagaaaaattttaattgcatgtattgcttgcattatttttctcttgggcagtatggatctggataatttgtctatgaagatatatttacaattatatgtgcttctctctgtctatctgtatcagtctgtcttttgaaggacattttattaaacagcattatatagtgtataatgaattacaatttgttattatttaacggtgcaattagaactttttttccccacatattggtacctgtaagttaatatcatcctctgtaattattatatagcaatctttagataaactgatttattagttgcctatcaatttatacgtagtaccagggatggatataaagaatagaaacaggtacagctgtggagaatgcaaccatttaagagtgggacagaagttatctctgcagactgtctggagaataaagaaacaaaggaacagaagctacttggaacagaggtgttgatggaaatgaagaaatagaagtccctaaaaggggtcaggtgctgtggctcacacctgtaattccagcactttgggaggctaaggcaggtggatcacctgaggtcaggatttcgaaactagcctggctaacatggtgaaattccatctctactaaaaatacaaacattagccaggcctggtgatgggcaccgtataatcccagctactcgggagtctgagacgggagaattgcttgaattcaggaggcagaagttgcagtgaactgagaccgcaccaccgcactccagcctgggtgacaagagcgagactctgtttcacacaaaaaactgagaaaatgtctgcaaactacttgaaatatgatttagctcccctgtactagaatatactcttcaagaggtcagatactgcttgtttttatgtgaacatatgtcaccaacaactagtaaacgtgcccaacacacagtagggattcagtaagtatgtgttgaagaaatgaatggaatggcaactctcaattttggatttctttgcttcgcattttaaaaattctgatagtggccagatagcggtagctcacggctgtaatcccagtactttgggaggccgaggcgggtgggtcacctgaggtcaggagttcgagaccagcctggccaacatggtgaaaccccatttctactaaaaatacaaaagttagccggtagtggtggcgcatgcctgtaatcccagctattcaggagtcggaggcaggagaatcgcttgaacctgggagttggagtttgcagtgagttgagatctcgccactgcattcccacctgggcaacaagaaagaaactccatctcaaaaaaataaaaattctgttagtattcacatagaaggatgatactgtgtcccataaaatatatccaagtttaccaagtagaagtagcatatattacattggtgcaaaagtaattgtgctttttgtcattactttcaaaggcaaaagccgtgatcagttttgcaccgacctaatagttgtgaatgtgagcttggacaagtttcttaagcttactggtcttccatgatcttccatgtccatctcaggatagttcgagcccaaactgcttgttaaggtccaggaagctgatacatatcagtgagtgctgataacagaaaaccatgctatgtctagttgctaattttttaagataagataaggctgtcattttttatgatagaaaagtgactctcgcaatttattgccaatgagaaccaccacattgttcattgattgcatattttaaagctctgtgtccagatattctaatttactacatcacagttggctatttctggccaggcgtggtggctcacacctgtaattccagtacgttgggaggccaaggtgggtggcctgcttcagcacagaagttcgaggccatcctaggcaacgtaataaaattgtctctccaaaaaaaaaaaaaaaaaaaaaaaaaagacacggtggcgtgtacctttagttccagttacagaatgaggcaggagaattacttgagcctgggaggcagaggttgcagtgagttgagaccatgccacgtcactccagcctgggcagtagagtgagaccttgtctcaaaacaaaagttggctatttctgcatttctccatttcagctaatacatctgtatgtacaggccctggacaggatgcctgggagacattaataagcaacattccgtttgggcctcaggaagctcatatcccataggggaactgacacaatgattagcacaaatacgtagataagtccttttgaaaaatgaattcccatgtgattattatcatcaacccacttctcaaatgttttttctttttgttgttgttgttttgagatggggtcccactctgtcacccaggctggagttcagtggtgcaatctcagctcactgcaacttccacctcccaggctcaagccatcctcctacctcagctgtccaagtagctgggaccacaggcttgtgctgccattcctgcctgacttttgtagttttggtagaggtggggtttcaccatgttgcccaggctggtcttgaactcctgagcccaagcaatctgcctgcttaggccttccaaagtgctgctaggattacaggtgtgacccaccaggcccagcccacttctgaaatgttaatgtgcataggaatcacttcagggttttgtatcaaattcagtttcttagatcctacccacagagtttctgattcaatcaatagggtggtgggggtgtcccagatcctgtgttgttaacaggactccctgtgtttcagaagctggtgctatgaaaactacaccttgaaaactattgtcagagtgtggtccacctctagaaaatattggcctgtctttgccagagtttcacccattccttagggagaacgggtgtagctgtctcttcctttccagtctgtgtaggaagcagaaccaagctcatagagaagcaattttttgttttttttgagatggagtctcactctgttgcacaggctggagtgcagtggtgcaatctcggcttactgcagcctctgcctcccggattcaagggattttcctggtgcaatctcggctcattgcagcctctgcctcccaggttcaagcaattctcctgcctcagctttcccagtagctgggactacaggtacccaccaccatgcccagctaatttttgtatttttagtagagacggggtttcaccatgttggccaggctggtcttgaactcttgatctcacgtgatctgccttggcctcccaaagtgctgggattacaggcgtgagctactgcatccagcctagcaattccttaagtaccttgttcatcccttccaaggtcagcttgggttcctcagtagtcgtggtatttctctgtggtgtaaaatgcacataaaggacttaaaaactaggtaagaaggcagttaaggataaaagttacacaacttcaaccatattctgttagagccacaaagggcttcagaaaccagctaatgattttagagaaaagatggcatgagtccaagaggtcacatgatctacccaaggtcacttgtgtctagagtttttgtgtatcatgacatgaccaatggccatggcccagaaaggctgattccttccttttccaaaaaaaaaaaaaaaaagatttgtgatacttcaatatattcagtgcccaccgcccaagcacggtgtcattcacaaggaattataatggatttcattgtagaatgcagactccttcttcccaattacttctttgctttaaacataaagccgagagcctgaccctgggaatagttcttgtctgaatttctgatagattttaatttcgcagctggagcctggtcctcacagtcattccctaatttcttttgttagtctactgcattcatctttggttctgtgtaggatccatagatggactgaactgtaacactgactttcttttctttgtctcacttgtcaaataaaatcatttgaggctgaatggtattgatagctgtgcaatgacttgttgctactgtagaggggaccctgcacacaccttcctgggagtcatgtttgttgttcaaatgagtcttctgagaatcaggatctcttgaaaaagataacacatcagtagtattaaaaactaacgaatagggcaaatcctcatttagctcctttcggtaataaattcatttgcttgggttcaggatttgtagagcatattctaaatgcattgctggctgagggatccatcagagtgggaaggggagatggggaaagccatcctgttgcattgaagaaacggaatctgtgatcaggaaacctggttaaaggtcctttcccctttgtaattttattctacatagggaggcaagagtggtgctgcaacatatggagagacttgagtttaattgttaaaattccactcagccgggccacttcttcactgtgatttgcactatttagcatttgtgtgcattaggtaatatatttaatgtttctccctccaatccaatttgcgtgtgtttggcagcagcccagctccatgggcatggggcaggggagatcataaatctgccatcctggagcatggaaactgtattgctgcatttgatagtatgcttgcatgaacactccaaaatgcttgtgaagcaataccacctcttccccgaacgtctctcagggacaacattaatgtatctcatattgtattgattgtagccaataagtgcctaaatgatttggtgcaaggcagaaagattatgcagggaagaggggtggaggtggctttagaagaagtatgtggtttaattactggctgaatttcctcaatccacctccccctctgggagtttaacaaacaggccttagtgcactttagctgttgctgacatctgttgaaatgatatctgcccgtgatgaggggagtttgggaattgcgcttggggtattggcgggatcagggagccacaggaagctcctttccagtctgcaaaattagaaggaggaaaacactgcagtagtactctaaggttaagctatggagagcacagttttatctaatggaattctgccttccgacttaatgaagccatcttcatcttaaatgcagggttggatgtaagtgtctagagtctaatgatcttaaagtcccaggtgttgataacaaacacagagttgagctgaaaacatgaatagtgcatgggcaatgcttcaggcacccaattgtaaaaaccacccccagctctctctttttaatgccatgctaagaactgttaggaaacttcacagtttttaggtaaacaacaagtgaccgattttcttgcattttttaatagaagcaaaagaagccaaaacctagctaaaatttcatgttgggtccagcaccaggaagaatgatgctgtgtatctgctagtgttttgattacatcaataattcaaagaaagtgccatccacttaatctcttttatgcctctccacccgaaaggatcctggttgtattctgaaagtcctgaagctatcatattccacagctttttctgaaatgtgttattatgttatgcttgaaacatttatatatgttaccgaccaaattgcatggaaacgatttgctttcagagactgataaaaattcacttttgatggtagacacaaggtgagatgttatcaaaacaaaattccaaattaacttggatatctctatcagaacatatccctgattgggcatgtgattcttgcattattttgtgtgtgtgtgtgtgtgtgtgtgtgtgttggtcattgtatttaaaaatgtgtttgcatacgtgtgtatatggatatatatgtgccaggtattaggctggctaattattgtgactaaaactctctggggttaagtggaaaattaaaaattcagaacaaccatagtctgttatctgtcacctgtaatttaggctaatatctcaattctcttgttatggacatttctcttacagtgtggctttacataatgggaattggatgtaatgtgatcaattaattagagcatatgatttacattagtcaaacctgtattgattacaaaatgactatgatctgaaagtagccttgtgtgtgtgtgtgtgtgtgtgtgtgtgtgtgtgtgtgtgttagaagtggtgatcctgctttgtatgtggccaacttggggagggggatggatttttcactttattattgtgacgtgtgatagacctatggggtgttttaaaattcccaagcaaataatcttgctggtggtgacagaagaggaaggctttgaagaggggtgtggtggctcacgcatgtaatcccactactttgggaggccaaggagggtggatcaccttaggtcaggatcaccagcatgggcaacacactgaaaccttgtctctactaaacatacaaaaattagctggacgtggtggtgcacgcttgtaatcccagctactcagaaggctgaggcaggagaatcacttgaacctgggagcacagaggttgcagtgagccaagatcatgccaccgcactgcagcctgggccatagagtgagactccatcttaaaaaaataataataaaaaacaaaaaaagggaaaggctttgaggtaaaagctagaggtacttacacttgagattggttcagattttataactcaacagacaagtatctgattctctgcatcctcctatgtttgaaccataaatttattagaaagcatatataggaaaaaacaacccagttcctttgagtctgaaactttctagtccctaattactttttcccattggaagtatatttatagcatacaaatctaaacttctcaacttaccttgataactggtccccatgttgatggccatggggcgtcttgaagaccatcagtgatccaagtatattccattagttttcatgtcaagaacattttattgtatcctaattatctgaaacttggtcatctgaaataacatggcagttcccgataaatcattgcctttttgatttcctagccatcttgaatacaggaaggcttagtttagcctttgcttttaaattcatataaatacaatgatattgagtatctctactttagaataacactgaactagtactgggatttttaaatttgatattcggacagctctttttctgttctgtggttttgtgcatgtgtgtgtgtgcatataaacatgtatgtgtgtgcatgtataggtatctggatacacatctagatgtgtttatatctagattgatacatacatgtgtatatatatccatcctcctatctggacacgcatatttgttacttgaaaataagtagggcttgcatacattgtagttactattgtaagtgctttccaaatatttaactcatttactagcccaacgactttatgctttaggcactgtattttcatttaaccaatggggacagtgacgcacaaagaagctaattagtttgtctgaggtcacagaggtagtaagtggcaggattgggattcaattgataatgcagtgcttcatacaaataatgctttgcaatttttgagcacttttctacatgtcagatagagggatttaattttttactcatttgatttttatggccagtctatgagttgatttccatcattgctagtttgctgaatgggacacagaggctgaaagaataacacatctgtagtcacagagttagaagctgatggaactgaactttgcatccaggaaatcagactagagaatttttaataaattatcaagaaagtttataggcagcattgaagatttcctcatcagctttatacatatgtatatgtatatatgtttatatttatatgcacgtatttataagtacattgtagacagatgaaaaataataaaagcaggaagtaccttttgttgtgttgactgtgttttgcccccaaacttacaactctcaatagttgtcttttctgttagctgaaattaaatagagaattatcttagcattttcccccaataactttaaggtttcttaagagatggtaagtccctttgaagactagagtgatttgactcaacttctccttctagtaaaaaaaagtctgccaccaatacatgtttatatttgttaaaataacatacttatcagtatgaagtggcatcagcaaaaccaatgacttaaaggtacaattgtcaacctatgttgaaaatatgttgaatttccaagagggaaacggctgcttgatcagagttcatttatatccacgagcattgcaccagcaataaactttaagttaatgttaacaattttaatttgtatcttttaattgttgaagtctgaattgctttccaatttcccacagagtttaatgtgtatgcaaattgcacagccagaaatttaagatacaaaagatagactgcgttttgcaaacataccataattattgcttaatttttaaagggtctttctctttgtcagggtattgttcggtttcttgaaactgaacagaagaaaacttttggttaatgattagtataaatcttgtaatggaacttaattgaatattaactttgttgttctcacaactacagactactcaattccctgtttctctgaggtagggtttcttgctctgttagtgcaaataatttgtcttctagtaatagcaggaaacagttatcagaacaccagtttaattgtctgaaggttgtgcactacatgtaagctcttagaaaaaggttaaaagaattctcatgtctattttaatattatatttcgtaatcatttaaacagcttggcagtcctagcaaagtaaaaaaaaactaaaattgaaggtaaatgccgttcttttgttaaaattcaaggtaggaaatgctgagatttagaaaaaatatagatataaatatatgtacattatatttagtgtacaatagcatatgtagtatataattatctatttatttatttacttattgagtgtaaaatgaaagcagccaaagcagtacatttggtggattagtagtgatttagctatgaagcatttatatattcaaatatttgttgctaaatattcctaaagcctatggggttctagaaactggcttaggagaggagactgaaggatgaacaacactcattagtgtcttccattgtgttcaagtgtttacacatgaatccaagaaataataagatgctacagatggtgaaaactaatctgaagggggcaaaatgaagccagtgagacacagaatggtttggggatgggggcagttgtgttagacaaggttttagggaaaagatgatgtcagagctcttggcaatgacttggccctaccagaagcaagagacaaagttctaaatgagaacagctggttgtattgaagaaccaaaataggattttaatttggttatatcattgtgatcgatgacttttgttgctttttggtgtctccaaattgcaatcctgtttcacattttgtgttcctttccctcagactattccaagaatgaaggatgtttgatgatggctacaggttgtcttgtacagaaaacttaatatatcaggctctcttgagagagtaggaagggcattttattacagactccagtctaaaattccttctgagtactttaaaatatacccacaaatactggagtcatgtttcttctttttttaattaattaagtattattattattattattttgcgactgagtttcactctatcacccaggctggagtgcagtggcacgatctaggctcactgtaacctccgcctcccaggttcaagcgattctcgtgcctcggcatcctgagtagctggaattacaagcatccactaccatgcctggctaatttttgtattattagtagagacagggtttcaccatgttggccaagttggtcttgaactcctgacttcaggtgatccgcccgcctctgcctcccaaagtacagggattacaggtgtgagccactgagcctggcctttttattttattttattttattttattttattttttatttttatttattttttttatttatttttttttttagagatcaggtctcacttgttgatcaggctggtcctgaactcctgggttcaagcggtccacctgcctcggcctccaaaagtgatgggatgacaggcatgagccgttgtgcctggccaggagctacatttttactccagattcattggtggaccagagtgatttggtgatacttaaactcattctgattttttttaatttttattttttatttgagacggagtcttgctctgtcacccaggctggagcattctcagttgtttaatggtggttttaaaatgttttattatgaaaaatttcaaaaaaacacaaaagtagaatagtatactgatccctcatatgctttacagcagatttcaacaactaccaatatgtggccaaacttgttttgtgctttaatcttcttctcccttccccatcaatattttgaagcaaatccaaaatatactattattattaaatatatcagtatgtatattggaaaaaatgaaactttttaaaaaaagaactgtattgtcattaatgttattatgcctttaaaattagcaataggccaggcatgttggctcatgcctgtaatcccagtattttgggaggctgaggtgagcggatcacttgaggtcaggagtttgagagcagcctgagcaacatggtgaaaccctgtctttactaaaaatacagaagttaaccaggtgtggtggcacacacttgtaatttcagctactccagaggctgaggcaggagaattgcttggacctagcaggcagaggttgcagtgagccaagatcacaccactgcactccagcctgggcaacagggagactctgtttcaaagaaaaaaaaaaaaaaagattatttaagtaggtgtccaaacatcatattatttttaaagttttcagtacttacaattagaatatgagaattcttaaggaaaaaaaaagtactgtcattagcgttattatgccttgaaagtagcaataatctgttaatataagcaagcattctatcattgttcaagtctacctgataatcttacacatttttaaagttttattatcagaaatttaaacatgatcgatatgtctcaaattaaaattagtcgatacatctctcaagtttcttttattaaactggtaccacctccaactcagtgtttgcaatctatttgttgaggtcaccgggtcatttttatgcaacagtctctacatagtctggttttgctaattgcattctttcttctttatattttctgttgactggtggttaaattcagaagtttgatgagatttttgttcaattttgcttttggcaaaaacacataataagttttcttttctttttttctttctttttctttctttttttttttttttttttttgagacagagtctcgctctcctctgtcgcccaggctggagtgcagtggcatgatctcggctcactgcaacctctgcctaccgggttcatgccattctcctgcctcagcctcccaagtagctgggactacaggtgtccgccatcatgcctggctaactttctatatttttagtagagacggtttcactgtgttagccaggatgctctcgatctcctgaccttgtgatccgcccgcctcggcctcccaaagtgctgggattacaggcgtgagccaccgcacctgggaaacacataataaattttcttgtttacttccattaggaaccacataatgcttttctttattgaagtcctttttggaaatttttatcagtcactagcaaccattaccatcactcctttttcatttattagatagaatacttgtacagagaaaaatcttttactgattctttgcttaccccaaggtagagttcatgtgagaaaaataggggcatctgtatcttccttcatttttttccagttttcaaatccgtttgagttagtttgcttgcatattccaaaggagactaatgatcattctaaatgtccattctgaagctctgttgttggccagtgggaatgtctttctgctgtctccttgttcagatggatggagagattccttgctttgtgaggtgacaaggtgttcctggtcaacttatgtatttcctaccctggccctgactctgtgtgtgtgtgtttgtgtgtatgtgtatgtgtatgtgtatgtgtatgtgtatttgtatatgtatatgtatatgtatatgtatatgtatatgtatatgtatatgtatatgtatacgtgtatgtatattttgagatggagtctcgctttgttgccgaggatggagtacagttgcatgatctcaactcgttgcaacctccgcctcccgggttcaagtgatgctcctacatcagcctcccgagtagctgggattacaggcacgtgccatcacaccctgctaatttttgtatttttagtagagacagggtttcaccatgttggccagggtggtctcaaactcctgacctgaagtgatccatcctccttggcctcccacggtgctgggatcacagggatgcgtcaacacactggcctctattatttgtttttagaagcttttcagaaccaggaggcagctcaatttgggagattttgtgaacatctttattattattactttaactctgttcagcacttgtctcaacttttcttattaagtggggagtccccatagtaagcgggggtccccaaaatagaagatcagttctactttttttctcctggagtttcttcttgtgcacacgattgagcacgtgagtgaactcctggtgtttagagtgacagtatccctgggcatagttgattcagggatgggcatgtgatcaggtggaccaccgagagattcctgggggactttgctcttagacgctatggagaaatttttttttctcatggggttgttgatcttgttaggtgagtctagggttattgtggccatccacctctcagtgtactgacatgcaatctaagaaattaggaaagggaaaaatcttgatgctgtcacttgaggccctggatacagcggtgcatgaagttaatctatctactttggaactttgcaagcatgtgagccagtgcattttcttgtatcctctaaagctattttgtgtttgtgtgagcacatgtgtttacacatgaaattgccctgatatgaaggttttctgtttatccagcaagaaagagatttaaaaaagatcttttcaactattttcgctgggcgcgatggctcatgtctgtaattccagcacttgggaagctgaggcaggcggatcatgaggtcaggagttggagaccagcctggccaaaatggtgaaaccccgtctctactaaaaatacaaaaatttgctgggcgtggtggcatgcacatgtcatcccagccactcgggaggctgaggcaggagaatcgcttgaacctgggaggcagaggttgcagggagccgagattgcgccactgcactccagcctggtgatagagtgagggtccaactcaaaaacaaagaaacaaacaaaaaactattttcaaatagcactaagtggcttaaaatacacttcctgaatgtcggctttgtttgaggaatgtgttgtggtagatgctatataataaagggaaattaggctgataggagtttctctcaacatcccgatacactcagcgtgttaagataaggctagaaatcagaataacacaagacagaaacttaggaagttagaaagtgtaagaatgtaggaaaggcgatgaggtcaacattttattacagttattttctccaaactatgagtggatcttggtggtctttttttttcttcttcttttttctctgttgtgtttggtttcccaaagagaggttatacaatcaggccatgatttacaaagaatagtcttgcaggagcattgcgtaaaatgggtttaaagaagaatgaaagatgctagacagatcgtttaaaaaggagtttctgggccaggcacggtggctcacgcctgtaatcccagcactttgggaggccgaggtgggtggatcacaaggtcagcagatcaagaccatcctggccaacatggtgaaacccccgtctctactaaaagtgcaaaaattagctgggcgtgatggtgagcacttgtagtcccagctactcaggaggctgaggcaagagaatcacttagacctgggaggcggaggttgcactgagcagagattgcgccactgtactgcagcctggtgacagagcgagactccatcttaaaaaaaaaaaaagaaaaaattataaaagaaggagtagtttgtgaagccctgttaaatcctgctctcagggatgcatatttacaccctttaaaaataaaataaaaccagaggttgaaacaaggtattaaaatacctctggagaaaaactaacctcttccaggaaagttttgttagctataaactcaaaggttgatacatgtagcatcaaaggaacataggaaagcttagttgatgctgtaattattaaacacaaacaatgtaattaagttagtatgtattagaaaaaaacatgatatgcacatcaagtctaattttattaatagaactttttgggatgagactaaaggacaattccttgtccaggttctacttataaattgcaaagactcactaatggttttcagatgattggttatttggtaaattggctttcagtgggtcaatgaaatggtcattaggagaactgtcaataaatttatctgctttcttttaaaaaaacatcccattttcccagggtagaaatgaggggtttttttttttttttttataaaaaaagtaacgcttcacaaatttgcgtgccatctttgcacaggtgccataccaccttctctgtatcattctagttttagtatatgtgttgccaatgtggacactagaaatcagttttgttttgtacttaatagagcatctttttaaatcttatgcacagaagaatgatgcatagaagaatctgtaatgcataagaagcatcttatgcattatcttttgaatcttatgcatagaagaatatataatgcataagaacaacgcattatatattaattagattaaattaactccattcggatacctaaggttatatttgtgtattaaactcctcaacatcagggtaaaagcaaagacaacatggcatcagattctttgtccaccggttttatttagtctcagagacccaagctggtcagcatttggctctggtggagtcaccatagcctggatttgaaggtttggagcccagcccaggtttggaggatcagtaagttggtatgccagcactccaagagagagaccatctctttgtcatggacacgtcctagctatgtatctaaggtttattagtacaatgaatttctatttaatggctttaatttagaacagttttcttgaaagcctcaacattggtattccattgtctgggcattttttctatatagggaaaatatacaaaagccacatcataaccaggaagatgtatggtgagctggtattcaagaaaggagaagtagctgtgagacaccaaggattggctgtaccagattaagataacctaatccacgtgtctctataagtggctgggtcagctgttggaacctgttgggacagaacaggttgaatccttgagcaaagaggccaggtgaggtgactcacacctgtaattccaggactttgtaaggtgggccgatcacttgaggtcaggagttcgagaccagcttggccaacatggtgaaaccccatttctaccaaaaatacaaaaattagcagagcatgatggtgcgtgcctgttatcccagctacttgggaggctgaggcaggagcattccttgaatccaggaggcagaagttgcagtcagctgagatcgcgtcattgcactccagcctgggtgacaagagcgagattccatctcaaaaacaaaaaacgaaaaaaaacccaaaactaaacaaaataaacacatatcctcacctttttgtgtgtgggacatacagtatgaaaagatgagtgctaatagctttccccttacctttcaagagaacctaaagatacttgcctccattccagtcatcttcctccctttcaatgagactgtgttcttgcttgctttgggggagaaagactaagttgacttatagaatagagggatggcaaggaaacatcccaatacagtcagtatttcttgtggaaggacaaaaagagaaaagtttctgggttatgtctagaaagataattgacaggaatggggagaaggaacccagtaatggcaggtgaacgagaaaattggtacaatgataagtgttctgtaatttttatcttgagaaatggaaaagcagctcctgaaagatcctattagtgatggcttggtgttggtaggaggtggcttgacactcacagatagactttggtgttgcctgttgaacacaaacaatttcatagaatatcagcatcagacaaggccatctcaggactgtggtgggtcaggacaagacaagaccgctaggtgatcatgtctgaactcagtccaaaacatggaccttgcctaaatcgcaagatgaccattcatcttctttttctggctcacatgagtgactgctgcttcttcaccgactacagctttcgcttcactaaattcttcccttcttctggataagaactatgaagatacccagtgatataattggtctttctgacagcatccaatccagagaaaagccccaattctttaacccctactcaggatcacgtaacagaaaggcaaatcctctaagaagctggacagcatcttactgagatactccgtggttcctcatggtatatgttctcctttgcaataggtagtaaaccctactttgttcaaatacaggtgtacatttaaacatctttggctagaggacatacataatgtcattaaatttatttatttatttatttttttttgagatggagtctcactctgtttgttgccaggctggagtgcagtggcacgatctcggttcactgcatcctctgcctccgaggtccaagcgattctcctgtctcagcctctcgagtagctgggattacaggtacacaccagtatacccagctaatttttgtatttttagtagggacggggttttatcatgttggccaggatggtctcgattttctgaccttgtgatccacccgctttggcctcccaaagtgctgggattacaggcttgagccactgcgcccggccaaacaagtttttttatgtagagacagggtgtctattggtcaggctggaatggagtgatatgatcacagctcactgtagcctcgaactcctgggctcaagcagtcctcccacctcaccttcctgagtaggtaggactagagttgggaaccaccacacctggcttggtttcgggttttatagagacaaggtctccctgtgatgctcattctgatcttgaactcctggactcaagtgatcgtccttccttggtctcccaatgtgctgggattacggacatgagccaccatgcctggcaattaatttgattaagaaaaagtaaaccctatgcagaagagaacacttagcaaagttaagtcacctgcccaagaaccctcagctcccaagcagtggaatcacactttgaaccctgccattttctgtctgagcctttgttctgcctttaacatcacctccccatatggacgcaccgtcttgtctcttccatgttttcgtagtcttagttttctaccactgccagaagtaccacacatttggcaccttgaaataacaaatacatatgatctcacggttctataggtgagaaatctagttggctcatctggtttctacactgtgagtttttctcaacgctgatgtcaatggttggctgtatggactgataaggaggctctgggaagagtccattttcaaactccttcaggttgccagcaaaatttatttccttgcagctgtaaagctgaagtctccatttctttactggctggtagcagaagggcttctcttagatcctgggagctttttacgtccttttgtgaagtgtggactcttccaactcatagtcagcaatggtacgaatgcatctcatccttgaaatctcattgacttcttctgccatatgtacctcattgcagctggagaaagtcttgtgttttaaagtgcttttgtgattagatgggattttccccaataatccagagtcatctccgtatttttaggtgcatacttttgataacatctagaaaatcctatttgtcatgtcacgcatcgtattgacaggttctggggattaggacatgggtatcttggggaagtggggcataaatttgcctactgtacattgttaaacaccctcccatcctccagccatctttgactgttttagtcattctttcaatgtaaatgtacgtttctactctttcttgtttggaagctcttctctttaacatgattttgcatgtacttttgctgctaatttcttgactatacagggtaaactcccatgaaaatcatctcatttccctacatgcaggtccttagaaactgtgaggatggggtaaggctgctgccattgaagcctgcacgctcctgtgcgtttctgtagcccacctagtggacacctcagcattaggaagtatcaacatggacttgtaagaaccttcatgctgtctcctcaagcttgctagctggggcctcctagtacaacaggtgccgtgagaaacacgtgaaatggcaacagatttcagaaatggtagcaaaataaaaccagtataatgttgggcattgtgtctctcacccaacttagcattatctatattcagttgagagcaaacttggatccagttttcagccacagctactcctcttgccctttattgtttcatgtacaagttctcactgaaaaaaatatatatccacagcataatcagaatagttgttaccgaagaaaatgtaacaggatgatatttttggcgaattggctttaatgagttttgaatgaatagcttaaagtattagaaagtaaaattcaggccaggtgcggtggcttatacctgtaatcccagcactttgggagactgaggcaggtggatcacctgaggccaggagtttgagaccattctggccagtatgatgaaaccctgtctctactaaaaatacaaaaattagccaggcatggtggcgcatctgtaattccagacactcagaagtcagaggcagcagaatcgcttgaacctaggaagcaaaggttgcagtgatctgagatcataccactgcactccagcctgggtgacagggcaagactttgtctcaaaaaaaaagtagaattcagtgaacaagagtaaataattcaagaaattcaaggttgatagctataaaaatgaaattccctccctccctcccttcctccctcccttccttcctcctcccttcctccctccctcccttcctcctcccttcctccctccctcccttcctccctccctcccttcctccctccctcccttcctccctccctcccttcctcctccctcccttcctccctccctcccttcctcctcccttcctccctccctcccttcctccctccctcccttcctccctccctccctccctccctccctccctcccttcctccctccctcccttcctccctcccttcctccctccctccctccctcacttcctccctcccttcctccctccctcccttcctccctccctcccttcctccctccctccctccctcccttcctccctcccttcctccctccctcccttcctccctccctcccttcctccctcccttcctccctcccttcctccctccctcccttcctccctccctccctccctcccttcctccctccctccctccctcccttcctccctcccttcctccctccatccctccctccctcacttcctccctcccttccttcctctcttgctctttctctttctctcttcctttccctctttctctctgtccctctttcttttttcttcttgtctacttcctctccttcctctccttcctcttcttctctcttttctctctcactctctgtctcttccttctttctctttctttgtacatgtataatttgaagaccctgcgccaagcagtctcttggaattagaagcaccttaaaatgaaaaaaatgtctcgccactgtgacaaatccacaggccttgcaagaaaccctgcagatcactaacacacggccataggaatatattgactgcagcccaagcacaggagaagattaatcaatccaacagacttgcattaattgtgaaatggaagggatgatgcgatcaatgataggaatgaaagtgcagcagtaacgatgccacatccagctaatccaataatggagaagctgatgtatagcatattggaattctaccgtctgggcacttgtcaccataaagaatatcctagaattatagggaaaaattgagcaggcagcagttgagccaacctaatcagcctgataccacagtagttctcttgattaaacactaaattaagtggcattcagctctgtaacctgcttgccttgtgaaaaataatactagagctaacgtgaaaagtttgtattttaatcaaagcaaactacgaatattaaaatattcctgggctattttggtgccgtttagctgtgaacaagtttaataatttataaatggttcttttgccattggctacaaggaaaaagggtccaaagctatattgggaggtaaggcttcctgtgctaaaaatcaattagacttgatagaagctcagagaactcttaagaaaaaaaaaatgcactcaagaggccctgggagaattcaaatttagttaacttctataacggtttgcctaagggcatgaactctattctttgctgcaaagcacgtgatcattccaggaggggtgagacttaatcagctgtgaatactatgagggtcccttatacatatatgtcattattaagtcctgaagctcaaatacacagacaacctagagctaaatggcaaattctccaggaccaagagaaaactgcttttcatgaacatttagagaacactagagaaagaacttacattgtgagcatcaaacccagtctggttagactttctgtacagactcttacgctaggacacacactggtgagatcttggtgattattatatgcattggccagtgagacctcttagagttgaccgagtccgtgagcatccgaggggctagatctctggtggccagtgaaggagatgtgggttggaaaaggagggagagacactgatcacatctccccttttttttttgtttgtttgtttctttttttgagacagagtttttctctgtcacccaggctagagtgtggtggagtgatcttggatgacttaaaccaatggctctctggtaccgcctcctgggttcaagagattctcctgcctcagcctaccaagtagctgggattacacttgcatgccaccactgcccggctgatttttgtatttttagtagagacatggtttctccatgttggccaggctggtctcaaactcctggcctcaagtgatctacccatctctgcctctgcctccgcctcccaaagtgctgggattataggcatgagccactgctcccggcccacatctcttttcttgagcagaagatagtgtgctgataaagttctcccaccaaagtgagtcttagcagggccttgggcaagaggataaattaactacttaggctgttctttcctgttatattttgtttgttgtttgtttgtttttatttcaagtcaatttgtggccttgccttttaattgaaagcaaattcatttttttttttttcctgggtgggaaagggtcactgaaagaagagaggccatcaggctgtgtcttacatagttgaaaagtcaaaaactgcagacagatttggatttatttgatttcaataattagcagtcattcgtggagtcctcataccattccagggctggttctaagggcttttgcaacattaacttatgtaattcttttaatgattctgaggtcaagatgctatcatcattttcactttgcagaaggagaaactgaagcccagaaagcttaagcaatttgccaaggtcttaaagagtgcaagtgtggcagatggggattgaaaccaggcgggctgtttgttgctatgtgtttttaaaacaggttgggccttccaagttggatttttgtttgtttgtttttgttgtgtgtgtttgtttgtttttgttgtgcgtttgttttgttttgttttgtttgttttttgagacgaagtcttgctttgtcgcacaggctggagtgcagtggcatgatctcggctcactgcaagctccgcatcccgggttcacgccattatccagcctcagccttcaaagtacctgggactacaggtgcctgccaccatgctcggctaattttttgtatttttagtagagatgggagtttcaccatgttagtcaggatggtctcgatctcctgacctcgtgatccgcctgccttggccttccaaagtgctgggattacaggcgtgagccgccgcaccgtgccccaagttgtttttggacagtgatatcagtcatgagaaatgggaaggagtgggatgcctttggatgatgttagctcaagtggtattgcatgctcttccaccccatcttctgcacatttctctctggaaatacgcccttcattaatcctctgacattggctaagtagatcatgatgtggtgttctgatcaatgaggtctagtccagtcactgtaggtcaaatcagattatccagacctccaaaataataagtggactttaggtcagacgtatggagtcaccaatgagaaacagcttcagaatccatccagcaaagatctagaataatcataggatgagactatgatcactatcatttattgaccatcactgaatgctgggagctcttgcgggtgtttttgttcaacttgcttaactcataacatcagcaagatgaaagaaattttcccagttttaaagatacaggatctgaggctgacagaccaaatgtctggcaggtgagatctcataactactagtgacagacctgggactgaatcaggtctcttcaattccatcaccttttgtctatgaaagtactcatccttcaggtttctgaggccacatgggtgtgtcataggcaaggagccttcaatcatagatgacatggaaagtcgcatctgtctcatttcccaagccatgttaataactgcctggaacagacagtgagaaaaacaaggacattggaacaccttatttctggtttcctttctctcttgtacagtgtgatttttaaatgctgctaacaaaacattggaacagaattgtgctccagaaaaaaatgagatccaacagacctttctttattatgggacaattaattttaagctgactttatcagcaaagggaggccagagtgacttgctttgtaattgttgggaagctgtgcacactggattagaggagaagtaatgtttcctttcaagttttgacccattttaacaaactgatatcttagtgtgttcaggctgccataacaaaatgccgtagactgggtggcttgaacaagagctatttattttcccatagctggggaggctggaagttcaagatcagggtgccaagatggtcaggtcctggtggaggctctctttgtggttggcagatggccaccttctcaatgtgtcttcagtggcgtttcctcagtgtgtacaggtggagagagagagaaagcaagccctctctttctctccttttaagggcagtaatccccttatgaggatcttacttttatgatgttatcttctcaaaagtcccatctccaaatgtctttagactgagggttagggatttcacatacaaatttgtggtgtaatgctctgatactcattggctttgtgactgagattgagccatttagttctctaagcatcctttctttggtgaaaaaatgcttgtagtccctactcacataggactgctgaggtaattcaatgaagtaaggtatgctaggagcttaactcagtgttctgctcatgttatacgtgcaataaacataaaccagtccctctcacttgaaggaaaaattgcccactttctgacccagagaacatgtgacaatgtctggagacatgtttggttgctacgactgggaagaggatgctactcgcatctagcagatggagtgaaggcatgcctctaaatatcctgcattacacaggacagtccccaaagcaaagaattgtctgtatcaaaatgttagcagtgctgatgttgagaaactctggtataacctatcattgcaacacaactactaatgttatattacctggaatcagggaggagggaggatgccattaacaaattatataaagtctgttttttaagagagactgtttttctctgttgcccaggctggagtgcactggcacaatcactgctcactgcagcctcaaactcccaggctcaagcaatcctcttatcttagcctcccaaggaggtggaactacaggtgtgcaccaacatgcccagttaattttttaaaaacttgtagaaatggggtctcaccatgttacccaggtcattcttgagctcttgatctccaaaaatcttcctgcctcagcctcccaaagggctgggattacagatttgagccacggcgcttggctaaaatgctatatactctattccgtacgtcagtattctcactaaaagaaggaagagtaggtttcaaggaacttgaggatgaaatatgtaacagtattcactcagtatattaaaaataaatacacaatgtcattggaatggccgatttattgggacaggcaattgtgtatgcagaataaatgctcaaaaagaactgtccaaggtgctgaaactttgacaaatgaaaataacctgttcaaaatgatgtgtaaactgaaggttttgtttgtttttgaagtggagtctcgctctgtcgcccaggctggagtgtgcagtggcatgattttggctcactacaatgttagcctcctgggttcaagcaatcctcccacgtcagcctccctagtagccaggattacagtcatgcatcaccacgcctggcttttttttatttttatttttttgtttttattttattttatttttttttaaagtaggggtggggttttaccatgttggccaggctgatctcgaactcctgacctcaggtgatccactctcctcccacagtgctaggattacagtgataagcctcccaaagtgctagaattacaggagtgagacactgcaccccgtcttaaactgaattttaaaggggataactgtctttgcaaaaatacatttaaaaggttgggaaaatatattttggatttgattctcagtctttcaaggtaatgggaatggaatcttgagtgagagagagtggatgataaactagaagccaagttctttaccaggttgttttttcgagatggagtctcgctctgtcacccaggctggagtgcagtggcactgtctcggctcactgcaacctccgtctccaggattcaagcacttctcctgcattagcctcctgagtagctgagattacaggcatgtgccaccacacccggctaatttttttgtatttttactagaggcacttttgaacatattggccaggctggtctcaaactgctgacgttgtgatatacccgcctggacctcccaaagggctggaattacaggtgtgagccaccgtgcttagcttctttaccaggttctatgcttcctgaatgcagggattctgtttatctttttcttgcattatggaatagcataaacttggggtctgagacagagttaagggtcagttcatgttctctttttcctttcttcttagtcactctcagtagtctggatttgttgtggtgacagcagcagatgcatccagtggcattgtgaaggcattagtatcattataggcgctgaggctatgggtgagcatatggcctgggactgcaaatcagaaactgctcgcattcctgggattgttcttctagactatggagtagatctggagcttggcttcttagccttttctgggcatcagaaccacctcagagttggcaaaaacaaagaaacttgagccgtattatagacttatggaatctgaatcttctggagtataaggcactgagcaggaagttttgctcatcagtgttcagacagaggctggggagaggaaaaagtgtttttcccttcccaaatcaagcatcaattaattctcaggactgctttggatagaaggttgttcacattattctgagattttggcttatttaagagcctattagacaccatttgtggttcatctcctcttgtttaaaaggctcttttgagcaaacaagaagtatttgaaatttttttatgactagcggtctagttattcacatttctattatgttccattccattcccaataattcattttaataacattttctttttttttcttaaagattttttttttctgactaataacattttctgatttgggtagaaagaaatattattccacaataagcaattgtgaaatactaaatttacttggctttaattacatctatagaggtaagcaacgtgtttcagggaaatctaacttctctttgaagggtaaagacccagttaattcatcatttacccattatttggtgtgataggcaacaccagtagttattgctgtgtggtgatagggtttctttcttggaaagactacacttcctagtcactcattgcagttaagtgagaccataaggcttgttcttgccaatgaattgtaggcttagtaaagttcatcacttctgggacaaagcatggaagagtgagacaccaccagacatgaccatcccttgccgcggtgaatttgaagtcctttgttgagatcaggaaatcgccatcaacatgtatccccaagtaattatgtggaacgggacctgcctcatccccaagatctgtctcggacatgtggtagatccttctgccatactattcaaactgaagactgggagttaatatggtgtcatggtataaactagcctatagagttgagttttagaagaagcctttcggatactgaaaacaaggcactgaacttaaattctgcagactggatttaaatctgggctcatgtttctcacttgtttcgggacgtaacctaagtcactgaactgccgtgataacagacacagccacagtgtattcagcacacctatgtgccaagcattgcacacagcgttttgcatatatcatctcacgtaattcctccagccacacttccacttgggtagacacgcctcacttggtggatgtggaaacaggcgtgatacacgatgcaaaaccagaaagtggaaatgctgaacttgaagtcacatgtgactgatgcctattcccgtatttttcttttttctaaagtggagttgattaaactgtctacttcactgggccgttttaggatgctgtgagcagggtaggtgacaggacgtggttacccgccaggtgaggttattgtgatttggtttcggccagcacttgctgcagagaacttaagactgtttcttttctggctgtcacttgaccctgtgtaccaaccttgaaatccctcactggcattttggtaaatttgtttcatgtttttgtcccatcagtagtaaaggtttcaccattattttcatttcctggttgagcgaccctctttctttcatgacttttggcttcatccttcagcctctttctctttttttattgttccatgttgctgtgagcagaactcatttttcaaaagacagatggtggcaaccctgttctctctaaataaaaaagcaaaacagctgttaaggtgcaaacagagtcgcggccagcaaatcgtatctgcttcaagtgttggcgaagtttcccttcagggaatgggagctatctaaacaaaatgtgcagcctcggctgtgctctgccaaggcccaagtatagaatgatggcaaataatggaaatttatagtgtactatagatccagcacctttctatcttggcgggtgcatatttaaatgcagtgctaacggagctgaaatttatggctctctaataacgataaaatgccatcagagaatgagataaatcttggccccaaaccttagcatgcaacgcacacactgacgcgcgcacacatgcttgtaaaatatagccagatactgctaactcaggagtctgcgtttggaagaagccaacggaacagagaaagtagaggaagtgttttatagacgactgcaaattgttgttttcatgaggctggggtcaaggtacattgtggcctcaggttgaaatgagtgttgctttgtctcatggctgatacatgcttgaccttggtgagggaagcttttccttttctagatgttcaatagcttttctcttcacgttttcacaaccctgtgacaggccaacttccaaacaaacactgatgaattatcaccctctgggaaaagaacatcgtggtgtgcttaagcgttttcttctgtttgtttatttatttatttgtgcattcattcattcagagagaattggagtcttcgaggcttagcaacaacagagagatgaaagacatttaccaaaatgctatatttgcaaactgtcggcgacgtgtgaattaggtgtgccccctttctctacgggcagttgtggtcttcagggaatggaattttacaaaatatcatttaggaggttgtcattcacgtttgaaaacaggcgtggccagctcctccagccaacctgcatgtacacccagctgttttctctctgtggagcatctaggtcttaggaagggaagcccatctggaaatctgtcttaagcccttgctgaatttccacgagccgtgcattcgtggatcctgcaagttagtaactacctgaagaagggggcattctctactggcttgcattctaggtgtttcctccagcttctccttatgcaaggggacttctaatattttgggcgagatgtttagtttcagtgagaagcctaacctccgggagttgtttcaggccacctccattaagagttagatacttctttctagatgcttctttatgcataattgtgtgtgcgtgggtgttcatgaatattgtcttaattgctcctgtttttgaaatacaacgtctaatccagtctatcattgatggacatttggattggttccatgtctttgctattgtgattagtgccgcagtaaacatacatgtgcatgtgtccttatagcagcataatttataatcctttgggtatttacccagtaatgggatgactgggtcaaatgttatttctagttctagatccttgaggaattgccacactgtgttccacaacattaggagatatacctaatgtaaatgacatgttaatgggtgcagcacaccaacatggcacctgtatacacatgtaacaaacctgcacgttgtgcacatgtaccctataccttaaagtattaaaaaaaaaaaagaagaaatacaacgtctacagattaaaacccactctaggccaggtgcagtggctgacgactgtaatctcagcacattgggaggccaaagtgggaggatctcttgagctcaggagttcaagaccagcctgggcaacacagtgagacctcgtctctacaaaaaaattaaaaagcaataaataaataaataagcaaagaagaagcaaaaagaaagcgttcttgttcagaactgaaaaaaactgttcctggtttcctagtttttagaagtgtgtgtgtgtgagtgtgtgtatgtctgtgtgtgtatgtgtaaagactgagaggtaatgatactgattgagttgaaaataaccattcctttgtaatatttctaaaattttttaggacactaaattattttatataaaattatataatattaggtggtttggtgtgtttgccttgtttaggttttgttaggttggtgcttgagaaaaaaacaggtagatttggaaaatgctgatgtttaggatgaaaagggatccaatttttcatataaaatgaattctttggagtaagaccttttagctgagattcatggacttcatgaaagtatgtgtgtgtttgtgtgagtgggagagagagagtgggagagtgcattcatgctgttgtaggttttgctaagagattttgtactttttgttaagttgtcaaaagctctcttgtctgaacccctgagcccatggtcctctctctcctcttgtttgtgctgtggatttgcagttactttacagttcgaatgaatgatctgttctgtgaatacgtagtttcattttacagttagaatgatgtgatcagggctgtgattcctaggctaggccattactgggaaaggtgtgacttggaccagaaaaaaagtaaggaagtgaatctcatgctaaagagaacaagcttggtttcaaacactgcatgtttatgggctttgcccaccaggtttagcttgtacaaggaaatacccacgccccaattcccattaatcctgaacatatgattctctctagctgttccacacctcccaatctgtggtccagcaatactgacatttttgcgtgtgttccaactaaaccctgctctcttttacctcccagcctttccacattttgttctctccacctgaaactatattccctttcttctggctctctcttttttttttttttctctgatgaagtgctgctaccctcaggaaggcgtctgtagtgttttctagatcagcttaggtgaacctttcatgtcttcctgtagcctccccacttccattgtcaaggtatttactacaattgtcatgtctcaggccaggtgcggcgtacccggggactcttttatgccatctttatacctctgtgtaaatctaaaatattttcttttttttctttgtttctttgtttctttctttatttcctctttttttagacagaatcttgccctgttacccaggctggagtgcagaggcacagtcttggctcactgcaacctctgtccgccaggttcaagtgattctcctgcctcagcctacggagtagctgggattacaggctgccatgcccagctacttttttgtagttttagtagagatgaggtttcaccatgctggtgaggctggtcttgaactcctgatcttgtcatccacctgcctcaacctcccaaagtgctgggatttcaggcgtcagccaccgcgcccagccaatctaaaatattttcaaaatataatgtttatgaaaattaaataaaataaggaatctaggtcaatatctgtgttttatcaaagcaaccagaagatcagacatgtccacataaagagtgatgaacttgtattaacagaaaaggaaatgacattggacactgtctgtgtcatcacactgcagagggaagaggaagaggaggagggaaatgtccttccctctgagaaccatgagctcagtgaaatccctgcattcccacccacatccttaatgttcccagtatccaccaccctgaccggcttaagtgagcacttaagaatttttctcgaggccagtcttgaaggctcatgcctgtaatcccagaactttgcgatgctaagacaggcaaatcgcttgaggccaggagttctagaccagcatggccaacatggtgaaatcctgtctctacttaaaaatacaaaaattagttgggcatagtggcaggcatctgtaatcccagctactggggaggctgaggcaggagaatcggttgaacctgggaggcagaggctgcagtgagcccaggtcgtgctactgcactccagcatgagtgagagagcaagactctttttcaaaaaaattgttttttgttgaataaatgaataaacgaagcatcacaggacaagggaaacttgtctcttctcagttagttgctgagtaaattgttgtttcttatgtgttgcgtcggcccccacctcatttggttactacttgagtcctcttggtttcattttattttctctctctctctatatatatatatttactttttaatatttaaaaacatttttgaatattttagtatttatgttcttatatattttaaaatatttttatttttaaatttgttttatgtatgttttttatatatttgtatatatgttttatatatcagtattaatttttaatataatttatattgtatatattttatattaatattttatataaatattatattttataaaatttataaaattttataaaatttttatatttataaaatatattatattttataaaatatataaaagtaaaatattttattttttataaaatataatattttataaattatataaaaattttattaaaatttttatttccctcagcctatttgcacagactggattaagtgtccatcatagtatttaccaagctttttgcacataacaaaaatgaccctaaaaacaagagtaacagtttttatttattgagcatgtactatataccaggcatgcttgaaaagcctttatagatttatttctaattcttgaaggtagttggtattatcttcattctaaattgccagaaccttctttctctctctttctttctttcttttctttctttctttcttttctttctttctttattttcttttctttctttcttttctttctctctctctctccctccccttccccctccccttccccctccccctctccctccccttcccttccccctccccttcccctccccttccccctccccttccccctcccctttcctttcctttcctttccacagggtctcactgtgtcacccagattggagtgtggtggagcaatctccactcactgcaacctctgcctcctgggttataaatgatcctcccacctcagcctcctgagtagctgggactacagacacacccctaatttttgtattctttggtagagacgggatttcaccatgttggccaggttcgtcttgaactcaagacattaagtgatccacccacctcagcctcccaaagtgctgggattgcaggcatgaaccaccactgcacctggccgtgaaccccatattcttaaagatggtagagctgggattcgaagtcaggtctgcttaaacccagagcatatcttcatgccccacatttccctctgtctctctgagtttatggagttggttagaaatgtcgtatttctttttctttctttatactccagattccctgtgaggtcaggaactaggcctttttcatgataaccctagtgaagatcctaattttgaaaacttatctaatatttattgggaagctgttgtgagccaagcactgcagtaggctctggatatattaggcccatccccgtatagagctgacatgtagcagatgaaagcagaaaaagagaaaaaaaggtaagtaggcaaaatgaggaaaaacgaagtcttagtatgggccaaacagtttcctaatgtttggtatattagctcattttatccatgagacaagttctattcttattgacctgattttatatccaaggaagctgaggggcagagaatttgaacaactgcctccaatgttcacacagctagaatgctgcagaactagggcttgcaccccattgtctcactcttgagtcttcattctttatcactaaatagacacagccaggaaggaggcagaatgggcagtgaaatgcttttgcagaagttggcatttaatgtgaaggttgaaaaataagaaggaatgaccatttgaagtgtagagataagagaatcctatgcaaaaagcccagccagtgcaaaggcactgaggtaggagagagctgagtaaattcaaagaaaataaaacacatagtgggaggctgcagaaggagggaggtaatgaccattatgaaatgaatgggctgggcatggtagctcatgactataatcctatcactttgggaggccaaggcgggtggattgcctgaggtcaggagtccaagaccagaccgcatctctactaaaaatacaaaaagttagctgggagtggtggtgcatgcctgtaatcccagctacttgggaggctgagacaggagaattgcttgaacccaggaggcagaggttgcagtgagccgagatcatgtcattgaattctagcctggatgacagagtgagactccatctcaaaaaaaaaaagagagaaatgaatgatgggcttgagttgggtggagcacttgatgccagggctttaagaacagcctggccaacatggtgaaacttcgtctgtactaaaaaaaaaaaaaaaaaaaaaaaaaaaaaattagcttgccatagtggtacatgactataatttcagcactgggaaggccccagtataccttggaactcctctgcctaggttatctcccttgtcttaaatcagagatgggtgttacttactctacagtacacagaaacaggtatcacttatcaatccctgtgttcttttccacttagctcaaatacagcctcggcatccttctgaacactctggagtaggctgccatttttaatcacccagatgttaaatttattcatcatccctatatatatttcccacaggatcaaagtatatcgagtttggaaagggagttgaaaacaaggaagactccctgcttttgattcccatgagggcaatagctgtcactctcctaggggatgttttgataagacagccacttaggtttctatatcctcctgataaccgtatgttgaaaaaggatttaagaggaaggtcataaaaccagggatttcttaacagcagggtgtggcttggcttactaagaatatacttgtgatgcattttaatgacatgctttatgttatcatattaaagattgtaaaagcatctagtaatcatttaataaatattaatgaagcatttacaaattgcaccttaatttacagcattggcactcatatcgtgctctggacatgaatgcacagagacatggtggctttgacaaagactaccatggagagcctggttctgtgacattgtgccatcctggtaccataagtgattttttaaaataataattcttggagggcagttgagtgcaatgaagcttgatgcctaaagcagttttagcaattatttttctgtttggggaacattaaaacataatctaccatgaatttataatccatagcttctctctcatgcacttcttaataataagcagtagttataggcccttgtgcaaaaattctttgtagatgttaggagatacttcctcattgtgtaaacactggggcaggtaagggatatattgcaagcgataactgtggggtcgccactcccctgccaccatctttgtttgatgcttagggagatctcctgttctttgcaggcacttagatacgaatggaggagccccaggcacaaattcctcagcactctgtcctgctcttgttgctggacttgattgtctttcagacagtgcattcaatgttgagttcagagccattccctgcaattccctctggaccctgttggatgttaaccacgatggttctcacacggggctgggtgtcacgtggctcacagaaaactacagatggaagggccttagaagtcacctgctgcactcctcactttatagaggaggacactgaggcccagagaggaacaggacattcacaggccacacaccaggcaagaagcagagatgaaactgttacaggcaaggggctggatcccgaccccaagagagcgttctcagatctcccgcaagacaagagttgagggcgtgtctgtagagtgaagcgaaagtatgtttattaagaatgtagaggaataaaagaatgtccactccatagacagaacagccctgaaggctgctgcctgcccatttttatggttatttcttgatgatatgctaaacaaggggtgaattactcatgtctcccctttttagaccatatagggtaactctgtgatgttgccatggtgtttggaaactatcatggcgctcgtgagtatagcagtgaggacgaccagaggtccctctcagggccatctgggttttgatgggttttggctggcttctttactgcaaactgtttttatcagcaaggtccttatgacctgtattttgtgctgacctcctattttatcgtatgacttagaatgcctaaccttctgggaatgcatcctagtaggtctcagccttgttgtacccagcccctatggaagatggagttgctctggttcaaacacctctgacaaaaccggatcccaagacataagattgtgcagtgtgcatttgcatgcttctcagcctcagagctaaggagacctgggcatgtcctgggggggttttggatagaggggggcacctcttcatcaggggtgctggagaaggcctggcctggcctctggagcctgccgcactgccagtcaggacatcctagctgagcaggagccatgggcgtcccggggaatcctaggtactgagaggagatggccagcagatggcgctgcagggattcaaactggagcagccatatctgacagcaaccccaggtcagggattcaaagctccagcaaccaggatgagctgcttaatagtacaggcctggacttcagggatgcctagacccctctcgggagctcccacctggcctggaaagagagccaggtctagaatgggctggtgcaggtatctgtagactggtcatactgggtttgggatcagaccccagaccaagaaggaacaaagggaaaacaaaaggactagcgcagctgctgtgtccaggctggggtgcttgctatgtgggcaggactatggtcacaggccagggtggaaatggcagccagaaggcctccctctgcgtggggtctcccttaaacccaacttcttggggcctactctgaggacatcaagaccgtctcttctaggaaggcaagaggccaacacccatgaagctgctgtttttcctttcctgctcctgacttggaggcgtggagattgccaccaggccatgtttaatgtcttttaattaacggtttaactcgggtatccatgatgcaagggttttgcaaaggaattcaatctagttttcaaaattgcagaattaagtgggtaaagaacagttgagggcagcacttacatttctgaatatttagactctttttttcttcttctttcatttttttcacacttccaatctgcctcttttcttcttctctctgtttctatctctctcacacacatacacaatcacagctgcttcatacggcttctccccgtcccctctcctggcagctgtggcgtttctgcacagaggtgcagggaaggaggaaaggccttgggtcccctggtcaggatccagctgaaacaaccagaaatactgtccctgtacctctcaggtcgggtgacttactgtgcctctgaaccctctttcttccatacctcccctacccaattccgaggcctcaactttgtgctgccagagggcactatgccacctttaaatgagatttagaaaaagtttacacatggcacctgctgatctggacattccagtcggcttgctgtatctcctagttgcaagggagggctttgcttagagcagcctgtgccccgtagggtaataccggagctggcggcctcccaggaaggctgcaaagtgcttgggtgctttgccctctctgaagcatacatcagcacccctaaggtttagctgtgctgcagccacagcccacacactcctccattctccctgaacaataggacccttgctgagatagtctggtaggagaggggaggctctttcctgaacccgtctctcctaaacgctttctatgccttagagtgctaagaacagtctaccctccttacgagactgagtgtttcctgaaggcaggagctgtatcttattgaactctccagcgcacagaaaaaactcataaatatttgttcaactaataaacaagtaaatgaatagagaggatgaataatcttttagggtaagttaattacatctattttatttaaaatgcattatagaattttgtctctgtgccaggaactgcttaaagtattttttagatataatctcatagatgcctaacaaaaaccctgtaagttagacacccttaacatctccttttttcaggtggaataggagaggtacagattgggtaggtaacttgcccaaggtcaggcagagccaggattcaaactcaagcagtctggcttcagggcttttttttctaaatcactccctgtggtttctcttagtcttagaccaagactaatgtacttagaaatacccagccagggaacaagaatgcatagaatttaatcccccaagcccaactttcattattcagctttcaaaagacatggcagggaaggtttccagacagaagaggaatagtcagtttgtttttaattcaccagtaaaacaaatagacttctttccttttatatttgtaacatacagcttgcatttttttttattttaaacaagaaaaggaagaaataaatgagaaagaagggaaggaaggtggaggaggtgggagagagaaaggagagggaggagagggaaaccgggagaaaaaaagaagggagaagagaagggaggaagaaaagaagggaaaagagaaggaaggagggagagaaggggaaggaaaaggaaggaagaaacaagggtggaaggacgaaaggcaagaaggaagggaagaaggagaaggaaagaaaggaagccttatttaatctccagcacagaaagtgttcgcagccctgagaaacgtggtttctcatttgcctgttacttggcacagtttgactgcctagaagcctgcagaaatattggaagtcaaggtccaatataataattggcttacagatttgaagaaggatagatagactcttccatttccaagattcattagtccagctttctccgtaatagacagggcttgctctacgtgtaagccattttctaatcaaattggcacacagttcatgctctgacttggtataaatgggcttctgtgaaattgctctgcctgggctcagggctggagttagatgggatggattttatctctctgatgcttgatcatcttgggctctgcatggaggaaacctgtctctactaaaaatataaaattagctgggcgtggtggctcatgcctgtaatcccagctccttgggaggctgaggcaggagaatcgcttgaacccgggaggcggaggttgcagtgagctgaggttgaagcattgcactccaacctgggcaataagagtgaaactccctcacacacacacacacacacacacacaaaaaaaaaaaaaaaaaaaaaaaaaattgaaccacacatcattgtgacttctatttgtgaaatgttcccaaaggatatttgaaaatgtgaaccaactgtgaattattgcaggacttgatatgcacaggaaatgtaatagggacgtggaggttcgtaatgtgagtttggaaaccatggaacatccaaacattggcgatcaacaaagccagcagtatgtggacagcttatgagaaaaggtgtgggcatcgcttggatctgagtgggaatccaagctctgccactcagctatgtgttgctaggaaagtttgcaagcatctatgaaataatgaaagtttaaatgaccatagcagcaagcatgctgtttggaagaccaatctccagatgaacttaactaacggtttctagtaatgctaagcataaaacagaaaaaaaaaagctatatatatatatatatatatatatatatatatatacacacacacacacacacacacacacacacacacacacacatatacgtatatatatatgtgtatatatgtatatatatacacatatatatacgtatacgtgtatatatacacatatgtatacgtatacgtatatatatacacacatatatatacgtatacgtatatatatacacacatatatatacgtatacgtatatatatacacatatatatatacgtatatgtatatatatataaaatcaagaagagccagaagagattggaaagctctttggccctgatagaagaaagctgatgcgtcacacagaagaaacatgagtcttcagttcttcttttgctcttgtcttctctgtcaagaaaaatcatcttcagtcaggatggaatagagtttggtttaggtgacaaagtcagtgttggtgaagcagaatgaagagagtgctagctcttaagaaatctaatattttacctggactaatatctccaaacaggagagtaacttggacatgagatcattaagtatcattgacaatttgtggcaaaaagcagaagggtatgagatttgaaatgcggaaataggatattctaattttcaaaacagatgaaagaagctgggagactctataattatagggtggtagcatctcatggtgtaaccactattaatggttcacttgttcaatgattaaagtcccatgtgatctgatcttcacatgaatctggacattatgaaaagcatggcttgtggatttcttgaagatgaaagaatgataacttgattcttatgtccattcattgggaataatgaagacccagcaaatgccatttcttctcactagaatgggagatttggagaatggggtagacacatgatgtgtgaattccagcaagacagtcaacaaggacacacttttcggtcacgtgtgtgtgatccctttatgggaaaagtggaggatggtgggatagatagtcagaaaagtatgtgggaaagtaaaacattattacaaattggtgccaaaaattataatgagtagattggcccataaccctggtggttttaattgtagtgatgtcattgagctttgttctgagatatgtcctgatggcattttttctaaatggttggatcatgatagagaaggctgttcttcagtgacacagatgggatggagtggagtgcctctgtttaatggagtcaggactttcatacccattttacagatgaggaaatgaggcatatgaaatgtattcatttcctagcattgccataagttaacgccaactggatggctttaaaacaacagaagtttattcattcaaggttctggaggccacaagtctgaaatcaaaatgtcagcaaggccaagttccttctgaaggctctagggtagaatccttccttccttctcccaccttccagtggctccaggcgttccttggtttgtggccacatcactctagtctctgcctctgtcttcacatgctattgtctttgtttctctgtgtgttctttgctatttcgtatgtggacactccctttggatctaggacctactctaatctactatgattttctcttgatccttaccttatttacatctgtaaagactgtatttccaaataaggccacattctgaggttctgggtggacctgaatttgaagagacactattcaacccattatacaaagttatggggtctaattaaggccctcaaataagaggcaggtccaggacttgacttcatccgtgtctgactctaaaccacacattttttcttttgtcttaggggagataaggatagggaaatgaatccaatccttgtcatttgacaaagagtggaagggaatgtgggtatttatcttggaaataaaatgatcaagaaaggacatggggtgtgtggagcagaatgatcctgcagaaagaggacctttatgacctagttggtttgggatgggagatggtgtatgatgctgatgctgcttcttccaaggagggtagccagggttgtaagtaagactgtagactgggtggagaggaagcaactgcaggtatgctgcaggatagtggctacagctttgcatgtagagagtcagcaatgccttacagttaagaaaataaagctaagcttggctgcctggcctggaatcctgactcctctatttactcatgatgtcaactttggcaggttgtttaacctttgtgactacactgtagagataaaagcagtatcatggctgggtgctatggctcatacctgtaatctcagcactttgggaggccgaggcaggtggatcacttgaggtcaggatttcaagaccagcctggctaacatggtgaaaccccgtctctactaaaaatacaaaaattagctaggcatggtggcacatgcctgtagttctggctacttgggaggctgaggcaggagaatcacttgaacccgtaaggtggaggctgcagtgagccaagccaagatcatgccactgcactccagccgaggcaacagagtgagaccctgcctaaaaaaaaaagaaagaaaagaaaagaaaggcaatgtcaacgacatcgggcagatgtgatgaataattttgatgggattggcgagataatccagtactttataaatgctacctattgtgatttttaaaatactatactctgtgccctcaaacaacatcccgtgttttacccactgcagagaagatgcagatggcttgtgtctcatggggcctggctcacatgtaagccaacgtggtccttgctggcctgctggacacacagggagctccactaccttgccttctaactgatctctccctgatcagtataattacggaggccctgctttcttccagcagccaaattgttgggatggacttcctcgttatttgaagcatttgttactgaagttagtatggcctcctggctttgctcacatctgggaaagaaagtcgattctcctttgtatttagtggcttggaagctgccagcaactttcggatggccgtagtgtcccctcttgagaatcagagaatttcattattatttttaaaaatcttatcttggcggggtgcggtggcccacacctgtaatcccagttctttgggaggccaaggcgggcggatcgcttgaggtcaggagttcgagaccagactgaccaacatggtgaaaccccatctctactaaaaaaacaaaaacaaaaacaaaacaaaaaaatttagctgggtgtggtgggaggagcctgtagtcctagctacttgggaggctgaggcacaagaattgcttgaacccaggaggtggaggttgcagtgagctgagatcccagtgcactccaatctgggcaatagagcaagacttcatctcaaaaaacaaacaaataaataaataaataataaaaatcccatcttaattttttaaaggaaaaaaataaaacctatggtcatgagcaaattacagatcagctaaatcttatgtgggaacatctccccatctacagctatttctgtttgtttgtttgtttgtttgtttgttttgctagacgagtattttccctcctcaagctaattgcttgatggaattaaagacgataatctctaataattccagtgaacacatggttcattttcaggtagttttatcctcgaatttcacttgttattttgttgtcggtggcaaattttccttttaccctctatgagacacccccgccttgggtctacctgaactaaaaatgcgtttggtgtctccaggctcatggcatagccactctgggaaacttgtctaacttccagattctcaaatttctgcagctgagagcatgtctctcttttgggaaggaggcttttcctggctggtgggagaacagcttcaatttgggagacagtgtgagtcagcaggaataacgctaaatggctggaaatcagctcagcaaaaatagcaggagcacctactgtgtagagactgtccactagccctgtcttcagaaggcaagaaaggaatgccaactctctcctcttgggctgagtggggagatgagacagggcagggaagaaggaaagtgcagtaagcaggttctgatgacgaggcggtaaaggtgttgattttagggattatagggagaccacccgtgccttacctcctccttaaaagtccaaaaacaggacgggcacagtgggtcacgcctgtaatcctagaactttgggaggccgaggcgggcagatcacccgaggccaggagtttgagaccagcctggctgacatggtgaaaccccgtctctactaaaaatacaaaaattagccagatgtgatggcacatgcctgtaatcccagctacttgggaggctgaggcaggagattcgcttgatcccgggaggcggaggttgcagtgagccaagattgcgccactgcagtccagcctaggggatagagggagactcagtctcaaaaactgaaaacaatggtgaatgtgaacgtcctttaagaggacagagctgatcatcatgggtgatatgcttaggataactttaaagacacagaatggctccctgtggggcaacttaacagaaacaaaagcagatgaggaagggaggctgggatggggcttggttccctattgaacagtagaaagacattttgtccgggcgtggcgacttatgcctgtaatcccagcactttgggagcgtgagctggggaccagcctgagtaacatagcaaaacctcatctctactaaaaataaaacaaattagcccactagagtggcatctgcctgtgggcccagctactcaggaggctggggcaggaggattatttgagcctgggaagttcaagctgcagtgagctatgattgcactgctgcatttcaggctgggtgaccaagcaagaccctgtctaaaatgtctaaaataaaataataaaggcatttaattcaatacttagtgaatacttggatttctctccattgcggagatgaggtaggtatggcaggggatggggacgcggtggtgcaggtgtccatgccatggcttaagtgccatccctggagcaacaggacgttgtctgagtgattctcattgctggttctggattcaaatagcctgggtttgactcctggctctggtttttcctaacttggggcaccttgtttagcctctctccatctcagtgctctcatctgttcaaggggataatgataatgacagtatctactgggtaaggtccctgtaagaagtcactgtaggatgaaggcagaaagctagatcatgcctggtaatgaccaggttggtgctggaggagagggggctgaggttggagatcatcaatgcaccaggggtctcgggatgatgaagagagtcgctgccctctgcttcttcccccttcttccttgctgggctccagctggctgaaagtgtatgaccatctatctctagggcacttcagaaagatggatgggaagtgggaagaggggatgaggctgcctagagagccttgaaattttaacttctgtgaaatatccagagaagatccctggcaatgtttttgtgtctatctcattgaagacacatcagtgaggctagcagagggccctctttattggggagcagaacaggagacattcgcctttcagtgaggacacctcacatcagtgcccctgtagatttattgtgaattacctggggtttgggggaggggtctcagaaaatgcaatttctaattcacttggtctggggtggagtctaagatattgcattactttttttttttttcttttttcttttttttttttttttttgagatggagtcctgctctgttgcccaggctggagtgcagtggcgtgatctctgttcactgcaacctctgcctccccggttctatcgattctcattcctcagcctctgagtagctgggcctacaggtgcccaccaccatgcctggctaatttttgtatttttattagagacagggttttacattgttggccagggtggtctcaaacttgtggcctcaggtgatccacccgtcttggcctcccaaagtgctgggattacaggtgtgagccgctgcaccgggcctctgagacagtgcatttgtaatgagtttccaggtgatgccaacgctgttggtcctcagtctcactttgagtgttaagatcctgcaggatactccaagtgagaactgtacttgggattccgcaccctccccttcattcctcacccaggcttgcccatttgactgtggtgctggcccatttatcctagttaaagggttccacagttccctgtgattatccctcatgatacggatcacgttatacacttaaattaaataaaatgcaccctatcgaatgcactgcacacaaaaagaatatttatttgaatattaagtacagataagacttcccctgggattatttcagagcgcatttgcagaatttaattgcaatattttcccactcagtttctttctgaacgctacttgtgaaaatattttctttctgaaggtaaagctctgcgttgttggtttattattattattattttaaatctgaagagctctctgagctcggtcattacttccagtgtctaattaatcctgatgatgataaagtaaacagccaggtgacctagattttccttttaaattgctagcaattaacatgaatgcctgctcattgttgcagaacttttgggaatctagtccttccagttaggattccttaagttgggggttttaagagttcattttgtgtgaagcatatgtcttccagcactccttccattaagctttccaggaagaatgtgaacacagacacacacacacacacatatacagagcaacagtcaccaccaccacccagccaaccctttcagacaactgaactggaaaattagaaaatgaatactcctcaagtttctcaagctacagaatccttcccatttcttaaataatgacattttgtaaagtcatagaaatcagcaatagaaaagacctcttgtgtaaagatctcttcagatgcgaaagtcagaatagcatggaaagacagcctggggatgtccaccttgggtgccttctatccctatttccttgtctggagaattggtcccatgggacttagttcaccttgacatttttttttttttccatgacagccttgtagttgttacatgatttatttcttttgacattctctacaatgtgtagatgtggatttacagtgtcccatcctaaaactttcagaagcagtagccaatttttcacaatcttggttttctaccgctgtgttataggaaaggggtcccaatgcagatccccagatagggttcttggatctccctcaagaaagaattcagggcggccgggcgtggtggctcacgcttgtaatctcaatactttgggaggctgaggcaggcggattacaagggcaggagtttgagaccagcctgggtgtctgtactaaaattagaaaaattagctggatactgtggcggctgcccataatcccaactattcgggaggctgaggctggagaatcgcttgaaaccgtaaggcggaggttgcagtgaaccgaaatcgtgccactgcactccagcctcgtcgaaagagcaaaactccgtctcaaaaacaaacaaacaaacaaaaaaaacaaaaaacaaacaaagaaaaaaaaaaagaaagaattcagggaagtccatagagtaaagtgaaagcaagtttattaagaaagtaggggaataagaatggctagttcatagacagagtggatgaagggcagaggagcccctcatcagagtggatgatgagccccttggggctgcttgtttcccatttttatggttatttcttgatgacatgctaaacaaggagtagattattcatgcttcccctttttagatcatacagggtaacttcctgacgttgccatggcatttataaactgtcatggtgccagtgggagtgtggcagtgaggacaaccagaggtcaccttcgtcaccatcttggttttggtgggttttggctggcttctttactgcaaactgttctatcagcaaggtccttacgacctgtatcttgtcttgtgctgacctcctatcttatcctgtgacttagaatgccttagccatctgggaatgcagcccagtaggtcttagcctcttttttttttttttttttttttttttttgagatggagttttgctcttgttgcccaggctggagtgtgcaccggcacaatcttggctcaccataacctccacttcccaggttcaagagcttctcctgcctcagcctcccaagtagctgggattataggcatacaccaccatgccagaggtcttagcttcattttacccagcccctattcaagatggagttgctctggttcataaacctctgacaattgtgatgctgtctgctaaatatctaaggaaacagtgaggcacgtccagtccactgtcaacttatgaaaagaagaaatcacaacaacaacaacaaatggactactgaattcagtttactttcttgtagtgaaaaggcacgttatatagtgctttccgtgtgataggcactcttctaattgctttgcaaatattaactcattcaaatcatgtgatgaccctgtggggcacatgggtagacccaggcaaggaatttgttcaaggtctgtaagctaataaggagttgagttgagctttgaaccttggaagtctggctttcgattttgttctctgaaccactgcattttagatgcctctcaaatgtctctcagttaatatgatcaagatgactgcccagataaggccatggcctgtgtgtctctgctgaatctatttaattgggatgcagattataaaattatcaacttctgataaaattattattagagctctgtaatatccaatgagaaagaaaaaaaattacagttaaaacatcttaacttgaaaatgtcttgagaacatatattctatcccagtagagagattcaaatggtatgtaaatcccccacttgccctcccctccacactctttcccacctctggatgtagagagggggatgatgggaaaatcttcgctgagatgctcattctacacagagtttcctggctatagggtaacgatggtcccaggagaccggttcagggaagcatgccaagcccttttagttacccaggacattttggtgagtattgcttgaattttcttagactgagcaagggtttgggatgggatggggttgaaggagggcaattataacccttgatcatgagggaaagaaatggtgattgctttcgctgctgaaacaaatagaaatcatctttgtaataactgcaattgttttctccagccctcctctgccttggttcacaaaataccttattaaatctggagaataaaaatgtacctggggtaatggtttattattagaataaataataggcaatatgtttcttccaccctgcaaggtatcagatgccaagacatttcgtggtttagcttgtaaaggtgcttacatgtgtcagaccagccaggctcttcatggccaggggctgccctttcatttcaagaccagcatcaagcctgaagtgaacaactccacgagactgcattcttgcagaaagcagatgtgggaggccgaaggggatattggccacgtgctgcctggggctgccatgtcttgctcaatgtttgtctgtctgattaatctgtctggacctgggggacttcttttgttgataatggggtctttaccaagagggtgcatggcagagcaagtgtgaaaagcacttcctcccaagaaaacacctcattaaaacgtgtaatttgaggtttgttcaaattctgtgggcatcctgacctctgacatccctttaatcagataaccaacacttgaatctctccagtgacttatagccagagcagtgactctcttgatataagtaccattattaccaaacaatatgatgtttaaaggaatatcagaagtgctcactaaatgtgttgtcctgcctgggagatagcaccccataggtcattcgagtgctaagaatactaagtgttttgagattttaggatatgctccataaagtattcccgaggactcttagccataaattaaatatgttagagctttcagcatttgggtttattgtgcaagtttacgtataacaacaaatccattattattttttctacttagtacttagccttgacaagctctttcgtccgtctcccttgaccctccaaagctggcatcctttcaaaaccagacaagatttttacagcagataatggtcttccccaaggttaagaggaaaacatcgtgggagagctgggtgtgttctccaagctattttctcaagtgtattttgttcgtttatgcaacatgagacagaatcaagttcattaatcatggctgacttgagtcattgttgtgactttttgtttttacttttttaattgattatttctcacctcctttcctgaaacctaagcatttactagtgtaacacacttttgttcttccttgtgacaaaaagtaacaaccgccatgaccggtggtgggatctgtatttgcttatctgacataaactatcctgtcttcttagaatcagaggacacactttattgtgtgatacacttgcaagaagcagtgggtatgattacaaccatacgtcggattataggactgtattatgttcaaagatttcaggcctttataaactcaggtatctaataaacattacacatgagaccctagaagcagacgaggcaaagcgacctctctctttttattttctgtttgtacttttactttcctactgaagagaatccacacaaaaatacttatgtccctgcagaattggagcttttgttttgtttttcaagatagccaccctacatttactcttttggtgctatggggagttattttattattattattattatcattattattattattttgagacaaagtcttgctctgtcaccaggttggagtgcagtgacatgatctcagctcactgcaacctctgcctcccaggttcaagcaattctcctgcctcagcctcccgagtagctgggactacaggtgcccgccaccatgctagctagttttctgtatttttagtagagacggggtttcaccatgttggccaggatggtctcgatctcttgacctcatggtcctcctgcctcagcctcccaaagtgctgggattgcaggtgtgagccaccgtgcccggctgagttattttatagccaccattaatcacatacttactatgtgccaggccagatttggctttgatgctctacaaataacatctcatttaattattacaataaccatataactcaggcatttaaattatattattattgctgctcttagtatgaatttataaaactgatgcatgctcattgcaataagttgaagtgatataacagaatccaagattaaaaatgagaaaacctgcttctctgtcccttcttctccactattggtctggttcccaggacatcatttttctgcttttgtctgaagtttgttgtttatcattccagacttttttccaggtataaatggatatttttctgtgtgtgtaccttgtgtgtgtgcatagttttttatacacaaatggattataggttaaaaatgattttaacttgcttttgttttattttgtcatagacatcattcctgaaatcattcattttctaatggattcataatattccgtagtataggtcaaagtttggcaaattgtggccatgggccaaagacagctcactgcgtgattctgtaaataaagttttttttttgttttgtttttttgtttttttgtttttttgctggggggggaaggagtcttgctctgtcccccaggctggagtgcaatgatgcaatctctgctcattgcaacgtccacctcctgggttcaagcgattctcctgcctcagccccctgagtagctgggattacaggcaagtgccaacacgcccagctaatttttttttttttttttttttttttgtatttttagtaaatacggggtttcaccatgttggtcaggctggtgtcgaacatctgacctcatgatccacccgccttgtcctcccaaagtgctgggattacaggtgtgagccaccacatccaaccctgtaaataaaattttattggaacacagtggcacccatttgtttacacgttgtcagtggctgcttttccaccataatgggagaaccgagtagctgcaacaaagacaagagagtctgtggctctcaaagggcaatgcatttcctatttggctcttaggagaaaaagtttttcaattcctaatgtagatgaaccacaattcttttaaccatttcattacttgtggacattggcattcttctcagttctgggtctgttctgtgacaagcgctgtccttacttcctcattcgccgttgcactctggtaaagtgattcctagaatactaaccattgaattaaaggaaatggaagttctacatagtgataactgccagctgccccctcgaaacagtcagtaccaatttaccacccttcttaaaaagataatatcaaacctttcgaaaggaatctgatgctacaaaagtgtcattaatttagccaaattcacaaggcctcttggggaacaaagccaggatttggacccaagtcatttgacccagtgcttcttgtgaaaacctcctgtgtcattaatttgaataccaattgctggtatttgctgaatttttaaatgtgttaagtgctttgcttagtaattcttatagattatgctcacaataaaattagacactttgcaggtaccatattatctctatggtacaaatggggaaattgcctgcagagattatataatatggctaacgttacttaggagatgttcaaggactggacttccttagtctgattccttaacctccagtctccattggggagaaaactggatctacagaagggcccagtgctttgatatcagagaaatctaatttggtggaaattatactggttcttacctcaataagccaagtttggaaatttatgtgttttatggaactagacaacactagctagtcggtgcatgtcttgttttagagaaacacaagtgtgtaaacagcatcttgtcagggcacagtagctaatgagcacctgctaaggacaagtgaggcgcagattggggaggagggctaacagtgtaggtatccatggttttgtttggtttacctgaccctggaaactgtgtacaatggtgattcagagaggaaacctagtcaacccatccagatggtaattccctcttgaatatttcctatctttacggttttaggaattcactcactctgtgcctcagtttttccacctgtaaaatggagctaaaatcaaatcagctaatgaaatcaattgtcagctgcttacaaagttctgagaattaactaagcttataactaggaactgtttagcacattttatgacatattacaaacattggatacattttaacgaatgttagtgtgcaatttatttcagcaaaaagtgattaaggccaggtgcagtggcttgcgcctgtaatgccagcagtttgggaggcccaggcgggcggatcatttgaggtcaggagttcaagaccagcctggccaacatggcaaaactccatctctgctacaaatgcaaaaattagccgggtgtggtggcgctcacctggaatcccaggtactcgggaggctgaggcaggagaatcacttgaacctgggaggtggaggtttcagtgagctgagattgcgccactgcactccagcctgggtgacagaggaagactttgtttcaaaaataaataaataaataaagtgattaaaacaattactttcctagcagcatagttaaaattgagcaaaacctaaatattttgcaatcccaaagttccttcgcttccatcctccaccccccacaatctccctgactttatcctgcttttgactgtgccattcacggtatcttgtttctgtatccttggggaggtcctcccgcccaactcctatttactcagtaagggttagatcaagggtctcagctccagaaacaactgactgatgtctcctccactgcttcccgtccttcagcaggctgggttggtgcatctcctttgagcacccctggaaccctgttttttcttttctatcacatacgaccctgtatcatcatcattattttattcatcactcctcccctgtcttttttaaataaaatgtacaatgtgtcatttagatacacaccccctttcattagcacagcgctaggcagttagtaccctgagtacatatgtcaaatgtgtatcatagtcctgaaatgcatcaaggaaaacgcaaactccagggctcaccctaggtacttggagacgtgcgtttataggaaaatgccatcttgtttcagaagagtttataatgattacaaaaacagcaacgctgagaaataaagctaccaattgatttgatatattgagttctatgctggtaaacttgtccagtgttttccttctaagtgattcataattgtcctgaaaactggattttccaacattctattattgtggacatgaaaacatgaacatctatttatccattcatttattgtgtgtcttctgtttctttggactcctactttccccagttcaagttaatctctcaccagttccctcttgcacttgactcttgtgtcatattcaattactgcacttccataatctcactgagctttccacacatcctcctgcctttcctctgaatatatttttttcattctttacctggatacattgtctaaaagacaaaacaaaaacaaacaaaatacactaatacctttttcaattctccaagacaagttgggccacctcctatgcactgcaagcacctcttacactttcactgtacaaatgttctctgtattgtaattatccatagactcatctttttccccacctagacaatagctccagtagccttctttgctgttgtattcctggcacttaggacagtgtctgacatccagaaggtgcttgagatatgtgtatgtatatgtgcatgtgtgggtatgggtgtgtatgtgtgtgagtaaatatatatgaaaggatggatgagtaaacaagtggattccaaacatcgtactcatctctagaaaaggaaagccacctaaggctcagttctagttcttgcagagccagtctgatgtgtgggagagaaaaatcagactgaaaacagggtcagaataaagcaggaagaactgataagagagaactcaaagtcaggagaaggatgaaaaaggctgagtgagaaagcgtctttggccctgttggctaaatgaagataggagacggggaagatgaatccctgctattaaacatctcgttcaaccgggagagcaaagggtctcatgctgaagtttattgcttcagtttctaacctttcataagtgcttacttggcagccctttcaagagtggtatttgattctggaagcatcttaaaggaacagcgcccgaccttccactttactttttttcatttaggccataaaatatattggttttgtgcattactgccatgggagaaaaaaaatatcacatgttagtttccaaatgaaatgacatttgataaagtgtacatttaagatatttttcaaggctagcttttaaagaatgcacaggcagggtctttcttcatcacagactgtagggagttacaggtgcctttttttccacctcccctctccccacccggagcctctcccataatggttatggagaaaattttttaagagcctcattagttgcagcaataacttactgagtcttccaagaatcattacaccctgtttggggtgctgtttgatgagcaaggttgcagccgaaacacacaactcatgatgggattctgccgttttgtgcaatggacagctctttcttcacggaagatgtgaggaaagcatggatctgcattcgatgatccctacttaaaggaggggaggtcactggccacctaactcatgagatgtgtatgtcactggattgactcaaattggccagggactcccacttccaaacaaaggggttggcagtaggtggagtatggtggtggtggtggcaaccagtttactaataatttatgaaatggaacaggtgcatgacccaaaaaaagaagcaggatattgtcactagaatataagcaaaataatatgggatgctgtgcagggaaaaataaacacaacaaaaacaaacatgtctactatagagattacttgaaatatcctttttcttattcccaaatctcattttccttatttggcttcatttgaaggacagcatggctatttccttggctactgttggattttgcattgtctgcaataggaatatgataatgtggtgccacttcacatggcacaagtcagaggtcagtaggccccctggttccttcagtgtcgtcattgtgcttttgtgagtctggcaaatccttgtgatatttgaaggcagatgttaaaaatattaatcttgttatatactttttttttttcaatagagcgagacattgtctcgctttgttgcccaggctggagtgcagtggcttgatcttcattcactgcctacctctgccacccaggttcaagcagttctcttgcctcagcctcctgagtagctgggactacaggcgcattccaccacgtgtggctaatttttttgtatttttagtagagacagagttttaccatgttggccaggttcttctggaactcctgacctcagatgatctgcccacctcggcctcccaaagtgctgggattacaggtgtgagccaccatgcccggccaagataaactttttattaattaacgaaaatcaatgctatcactattactatacatttttaaaaacacttgtatttctgcaaggtactgatattaaaatacttgctgattataaatgccctgtatgtcacaaaggatagtttgaaaactacagaaagcattaagaaggaagcattgccctcagtctttaattgcatcagccatttagtttatattttacatgtagacaggtgttccattttgacttaatttttgtataaagtgtgaggtttaggtaaaggggtgtgtgtgtgtgtgtgtgtgtgtgtgtgtacacatccagttactctatcattatttgttctggatgtttcacttttttcggttttcttaaaggttgtgttatagggattatcacacacatatttctctcagtctacaagactcagtattttgcctctttagttggaatgcagaaaccttatcacccatgttaattagcttgacttcggtgattgtttttacaatttatacatacattaaaatatcaagttcaatacgttaaatatatgtaatttttattttttaattgtgcctcaataaagatgggagataataaagtttatcaccacgtatgcctctttgtttctgtagtctttgtgttttatctttttttttttttttttttttttggagttggggagtacagagtctcagtctgtgtgcaatggcatgatctcggctcactgcaacctccgtctcctgggttcaaacgattctcctgcctcagcctcccaaatagctgggattacaagcacgcgccatcatgcccagctaatttttgtatttttaatagagacggggttttgctgtgttgaccagactggtcttgaactcctaacctcaggtgatctgcgagcctcggtctttcaaagttctggaattacaggcgtgagcccctgcgcctggcctatattttgtttaacttccgtattgtatatccataaattaaaaagctcttcatgcacttccctcccccccagttttttgctttaagccattaaacatattttaatgaactcaagagtatagaaagctcttcatgcaatttcctttttttttttttttgctttaagccattaaacatattttaatgaactcaagagtccagtcacctattaacatttactcatatgtttaccatttccatttccagctcttcctttcttgttgtttgaagtttccttcaggtatcctatttcctttatctggaaaacttcctatagcgattattttagggcaggtctgtctgcagtgaattttcttagttactttcatatttcaccttcatttctaaaggatattttcattggatgtagtattctcagttgacaattattttttcagtatttcaataactgtgtgttattttctgctgacctctctggatttttgtttgtttagtttggattttgttttaaatccatagttctttgaattgttgggcccttacaagcattgcattgtttgtctctggttgttttcagtgttttaattttaggctttaccaatatgactgtgatatatgtggttgtggatttcgttgattttaactcttttagttccttgaaattgtttatatcttttgtcaaatgtaggaagttttcagccattatttcttaatttttttttttgcagtgaactctttatccttatattctagaatttcagtaacatgaaatattgtacgttttgatatttgttccacaggtcctgcatttctttttttttttttttttttttttttttttgtcttcaatttttttttcccctatgttgtttagaatggatactttttatgtactcaagtttacttctttttcttctgttgtcttcattctgtgtttggacaccttcagtgagattttattttattccgttttaattaattaattattttttttgagacgtctcactcttgtcacccaggctggagtgcagtggtgcagtctttactcactgcaacctccccctgccgggttcaagcgattctcctgtctcagccgtctgagtagctgggaataaaggtgcctgccacaacgcctggctaatttttgtatttttagtagagaaggggtttcaccatgttggccaggctggtctcaaattcctgacctcaggtgatccgacccgcttggcttcccaaaattctgggattacaggtgtgagccaccgtgcccagcccaatattttatttttatttttttaaaaaaatttagttatttttatggttgtaaaatttccttttgatttttttgttttgttttgtttgtttgtttgttttcgatggagtcttgctctgtctcccaggctagagtgcagtggcacaatcttggctcactgcaacctctgcctcccaggttcaagcaattttcctgcctcagcctccctagtagctgggactacagtcgcgtgtcgccacacccagctaattttttgtatttttagtagagacagggtttcatcgtattagccaggatggtctcgatctcctgacctcatgatccacccgcctcagccttccaaagtgctgggattacaggcgtgagccaccgcgcccagctccttttggttctttattatcttttgtttctttgctaatgctgtcaatttttttctcagttattttcagtgtgttttttcttaccgtttggagtcgttttataacagctgctttaaagtttttatttgataattccaacatctttgctatgttgatgttggtgtctgtgaatgtcttttcccatgcaaatttagattttcttggttcctagtatgctaagtcattttggtttgtattctgggtatattgaatattgtgttaggagactctaggtcttgtttaaaatcccatggaagttgttgatatttttgttttaataagcaatcaatcttgttgcattcaggctgaaagctcttgcttttcttctgtggatttgtttccaatatcagttctgttgggtgtctcccatatatatatcaagtctgggacatgggcagtagtctattccttagttcaattctcaaagcttatggaaacattttagggtcagatacagacatgagcacagaggtcagtgcaggagtttataaaaatactgtttgggggtgattttcccaaattattttctctccgggatcctcaaagtaatatttgttttctagggttccctgtttgttgtcctccacccagaaagctggtggttttttgtttgtttttaatttttctgttcacctgcttctcatctgagtctgcatttagggcaaagtgtcaagagaagagaggaaataaagaaaagcaatgggaggtgggagttgtttgcccaacctcttgagaccacagtcctagatgttaagtgtctgcagccacccctgttgccactgttgtttatacatgaacactaccctgagattgcctggagactgcagcataagaggacacacaaacttttaaaaagaaagaacagtaataaaaaaaaaagaacaatggggattttccctattctcttagtgttaagactcatctgtcttgtttttcaagacaaaaccagagtgcttctcctgagtctttatatggctgggtgtctgattttcagcccttggctaccttgcacccacactaaggggtattggtggtgggaggtggtaattcaccacttatgtggcggtactttaaattttggtcgttttgttcccccctccacttgctgctttttaattttcagagatctcaaatagctcccccatgcattctatacagatttccttgctgcattcagtgggggaaacaggatgaagtgttttcgctccatcttgtcaagaaccgaaacctcaccacccacttcatttattttgtgttaaaatacacataaaataaaatttaccttttttatcattttaaagtatacattttactggcatttaagtacattcacaatgttgtgcaaatatccagtttgagaacattttattcaccccaaatagaaacctcatacccattaagcagtcactcctccttttccattaacccagtcctctggcaacatttaatttgttctctgtctcaatgaattttccctacttcatcttttaacagtttatggagacataatttacataatataaagtcacctatttcaggtgtataattcaatgtgggctttttttttttggatatttatagaattgtaccagtttcttttttaattttttggaatatttctcccagtcttttcctctttagcttctttttttttcctttatttttatctttttttttttttcttttgagatggagtttcactcttgttgcccaggatggagtataatggtgggaactcagctcactgcaacctctgcctcccaggttcaagtgattctcctgcttcagccaactgagtagctgggattacagatgcccaccaccatgcccagctaatttttgtatttttagtagagaagaggtttcaccatattggccaggtttgtctcgaattcctgacctcacatgatccacccgccttggcctcccaaagtgctgggattacaggcatgagcaaccgtgcctggccttccttcattttctttaatgatctgtttcactgtatttttaacccaagataggaaccataatattgtatatttctgtggtttcttttcttaacaactaaatggtgtcttttgaacatttttcatatctctatatttaaaactatgtttctaaatggtacatgttatgccatactatcagtatactatattttttaatttttccattatcacacataatgtttataatttcttttttcatacataatgttgttgttaattgacatggaaataaacatttgtgtgcctctgcatatttttttaagagctaatcttagtggtaatatttctgggtaaaagggcatagaaaagcactgatttatagatttggggctctggtgcatccttaagtaaatattcttccttttttgtttttagagaaagtcaaaacaaactttgtatacaaaatgcgtaaaatatacatcaaaagttggttcctaaaccttcatatcccttagtaaaagtttcaaaaacttacagtatattgtctggtcctggaagtcgggagttgtttcactggttaaaaaaaaatactggaaagatatagaataaaggtgaatgaagacctaaattttatttcagcttaactattttagttgacagtggagtctaccagctcctgatgacagaatgaccatatatctcaaaattccttctatgtgttcctttttatttgtgtccttagcataatcatgtaatacgactccacccatccccttaacccacctatgttttcttgtttggataataaattatatggccactccaaagaagcgtccttggacattaagtaaaacatgtcagtagggcaaagataattaatgcatggcatatgtattgctaatacccactttcctatctgatggccgataccagaaacctatcaggatctctttctgtgattgaaggattggcttcacaattctccccagcacaatcctatggggacttactaccatctgattagaactggaccataaaatgtaacccagttgccaaggcatgacaactgacactactggccctaaacattggagaagactttgtgtgttttccactgacttatcatgaccatctggagtgggcctttatggaggaattcttgcacctgtgatatagggcaagctggggttttcagggaaaagggtggggagtttcatgacaagaggggaggtgccctcatcccaggcagatgctgcctcccacacatactcctgcacgtctctcctcttcccctttccagtctctgacttatcctagctgtgcttctgaatcacacaattgaactccaagtgaagcttgagctatgtagacctaaagaaaaattaaatacataattaattaattatgggttttctttgagctgagtaattaaaagtaactttctgttttctttcatgtttttctgatccggagccttctgacttttccccttcattttcttttctttctaggtttcaagacaacagatgaattgtgaaagagagcagctaagggtaggtgcacctgcttgtaaaatgcttcctgattctcatttttgtgtgataagcaaaaatttccttgtctctcccaagacacgggttctaaataacaggcttcatcttaagactggtagagttgaaaatatttatcccagcttatttagtattgattgagctgttaaatacagtatatcttctttggaagtgccgttatagtagatatggattttttgatttagattcagcaataaatacttttcttctggaatttgtttgacatcattgtactctttttatgtacaacacgaggtctaagtaataacaaaggtcaaaaggatggctggctgccttcttaatatgaataccaggctgtttgctgagtggctaaaatgctctttggctgttgactggggtgggtgagcaaggaatatgtcaagggcgttttctgggagaatttgtgttatctatagacctcttggttttagtgacatttgtgtatatgggagagggagacaaaattttaaaccttatattctgtttccccacttaaaaatgaaactgtcttggtgctcaggcatatcggtgtaagaagtattccctagatgtgcagggagtgtttggttataaatggagcttggtgacattgttctgctttcattgtgtcagagtggacattcttcttggtatggggatggcattttaagaaactttgggatttcttcccatttgttttcttctaaatgaattcgtgttttcagtggatgagatttagattatgattggtgtatttttcatgtcactaatggaagttggcagtttttactggacaatgtgccttatagccatgttttcaaattgttataaaaatcagagaaatatgctgcttttaaaaccacaacagtgggatttggcgttaggaaactcctgtgcccaaaggtgtctaataaataagcataatgtatttaacaggcctaatgccttcatacactgccctgtaacttttcagagcatttacctaatgatagtctcatgatggcaataatttgtagagttgcttccatttcacagttgctgttggcatcaggtttgtgaagtacttgggtaaaataaacaacagaatccaggtgcatgaaaccgagaaagtgagacaaggttttctgtttcttttatgcatatttgttttatgcagtatctcagtatggccctctctacccactttcctccaagtacctgtgccgacattcgttgtgaccctttccttcatggaacagacttcaagatttttaagcttttctgaactgtcttactgcttttttcctgtagtctgaattactggttcatcctgttaaataatgtattacaactttagatttctcttgctgtttggatggggacgatggtcagaactaggtcagagctagataaagagaaatatgtgcctttgtctccaggagtccctgataaatgcctgagaattaagataatattgaaatctctattgcaaatgacacttgcttggcaagttaaggacgcagtaggtaatgaaggacctgtttgcattttgagggattatttcccatttatgagtccattgtcgacaggagtgtggtttaggttcaagaatggagtcttcccctctctgttacataaatgcagggagtggcttgatattaacataatggttcatttagtttagtcccaagtatggctccaatagccccatctctaacatcacgaaccagtgctttgtttgttgttacttttatggtcactgttcttgctttttaaatgaatttatgttttgaattgatagatggcacatttgattggatagagcacacatatatagggttcaaaatttaaatagtaccaaagagagtgcaatggagttttcccttcccacgtgacttaggcgtctagttccctctgggagacccctagtgtgattaagtactggtagctatctcatctgtagatattttcttctgccctcttcatttttgttctctgtctttccatctctttcttcttcctttcctccctccctcttttcctttcacacctgtgtctgtaagagcccttccatcacctcaaaagaaaacttcccttattaaggtgattttttttttcggggggggggggcggggagcttttttttttttttttttttttttttagagagagtctctttctttcatcatgctggagtgccgtggcgcaatctcagttcaccgcaacctctgactccctggtttaagcaattctcgtgcctcagcctccagagtcgctgggattacaggcacgcgccaccacgcccagctaattttttttgtacttttagcagagatggggtttcaccatgttggccaggatggtctcgatctcctgacctcgtgatccgccagcctcggccccccaaggtgatgggattacaggtgtgagccactgcgccaaacctgggtgggggggcattttttaagggtttctgaaaggaatttagaactggaaggtaaatacctgtccatctcaatgaaatgcattttcctcaatctcattttgctttcttagaaagagagtggaagaaaattagaaatctgtttagttaccacatcgttgaagggtaactgtctgcaagccacaataaaaatgtgtcctaagtgcagcagtcaaaatgcatttccagatttgctatccaggatgactggactgtggccgtgttatcatgtcgagggtccttcattagtgcattctgttgtcagaattcagggatataagtggatagttgtcaaatttattccttttccttggcctcctggaaatagcagatgatttagaaagataaagctgcgctttctgttttgtgccccatcgaggctgtgtaggaattggcgtatccaatacttggtgttaggatctcctttctttttctcacgaagcctaaattaatttttccaaaacagacactgtgaagtgcttaatatcttgaagatattaaggagtctttaaaatgatcatatgattaattttaggaaataccatgttaaaaaaagctaaacagtttttattttttaactgcaggtcttctcatagcctttaatttgcaaaaatgaaatacaaagagttggatataatatacaacgtttttctaactcagctgactacgcaacacttttgtttatagaacatactcttgagatcatatcagtattatcagttaagatgctattatctgtgagttatagacaagctaagagttatggaaaagctaagagttatttacaaaaataaataactctccacctcccagttccagggttgattcagaggctttttggtatcagggcagtggtttgcaatccctgtgcttccgttggcctttctttccttcttccaagatgtctgccatctaccccatatcacgttctcacagggcagcactctcatcagaaggaaggagaagaggagtttctccttcacacgtcttgcattttactgcaggaaaataattcccagaattcgtcactgcagtcgttttcttagatgtcattggccaatctctacatcaatcactggcaaggtgaactggaatctcagcgattggctacagcagttatgattcatttgcagcatcaggcacattgttacctgcacaaaagtaggatttacttaaactggaggaagcagaaaatgcactccagtgttgttacccaatggagtctgctacaaaaggaattcacaggggtccactctgtttgtcagggtgctggtttcctgtcattagttttcattactctctttcatcctacatgtgtgggctcagcaactttgtgaattctggtttgtggaatttgacacagatgatttctctgccaacattgaatctcacaggtcacatcttccatcctaacctatatcctaacttttctacccatcttggcattgtctttgtattttgccttgtgtaatttggactgcactggatatagtctttggtcatatcccctcagcattaggtgtgggcagcaggcatggggcatcgtgcattagtaaccagctcagcccacagatgctgtccatgagcttcctgtcccctacccttccccaaagaagggcatcagccagttactcccaacagtagggtcactcttctcagagaactattgggattacttacatcgctcggttgttacgcacactacacaacagggaaacttgttcattcctccgtcccaaggtttgtcaatctagagtagactgagtgttcttctgagcttgcaattcacattattggctggattcttctggggacatggtcagaggagctcactatggaatctgtgcattaaccactcctgatcctataggctgtatttaccagcttgttctagcatcagcacaggttatggtgatagtcgtacagtgaccatatccaattatcaacatttacctctccagcatctgcaccaacagatggacaaataaacaactaagagagaaataaaatgatcctgggggcctgttgtttccctgaactatctaccagttgagggagattgtatgttcatagggtgggagattccaaagcccacctttctgagcactcataaaatatttgattacaaagggatctttgtgcttgagtggtagatgttggtttgggggctgattaacgagcttagttagaaaactactaggtagccaaatgcatgactgccagattctgttctgtggattcaaatactgatctgcaatatggcaatgtgactctatagtcagcatactaggaagggtggttagggctggtgaagcactggtatggacttaggttcagatcccacttctaaatgctccttagtgtctcaaagctttactttacctatacgtaaaataagaatagctttctcataggattggtgactggataaaacaacttcgttaaagcactgaaaaaaaaaaaaaatgcaggcctgatactcaacaaggtgagctactgttaatacagtgttattcccaataattatttcacttctcttcctcctagaaataccaggcatgagaatacagagaacacatatctactgccaccaaactccccacaaggaaagacaacataaagggcaggctctgtatttgatttcatggtgaagtatttaggagataactccctctcagttaaggttgtttggaatgcaaacaatagagacagattccagctatcttaagcagaaaaggcatgcaaccaggcctcccaggaatcagagcttagaatgggaaagctgcctgaactcaacgtatgtcttgctcatctcctgtctttgtttctgtttatgggtccactctggatttttcttttgataaagactccctctacctttatgcacacatcacaccttctagcccctaagatgtatgttgcatcgctttccaccggtatagggactaaccatcagtgcatcctcgttacaaattcctggaaaaggagcctgattggcttagtctggatcagttgttcactctgggccagttggatctgtccagggaagtggtatgaagcaacacagttgcccagggccaactcttgagggaagacttcattactggggaaaaggagccattgctagctgagtaaataacaccatagatgccgggtgcagtgactcacacctgtcatcccagcactttgggaggccaaggtgggtggatcacctgagatcaggagttggagactagcctagccaacatggtgaaaccccgtctctgctaaaaatacaaaaattagccaggcatggtggcgggcgcctgtagtcccagctactccggaggctgaggcaggagaattgcttgaccccgggaggtggaggttgcagtgagcagagatcatgccactgcactccagtctggtcgacagagggagactgtggggaaaaaaaaaaaaaaaacacgaaaaccaccagatatagatctctgctatgctttcaaaatgtggatatcagctgaacaaaggatcctggaaaatacatgtgctaccaccaactgctagctctgtatttctcaaaatataggacacctaccgcacgtcttactcacagctttcaggcgaacactaactcattaagaaagggggaatcacttagaaagttactcccctttccattgtctctctgtggtttttatgccaatcagaaatgctcagtttaaactaaagtatctttagcagggctgtaacactttctaagctttcttttttaagggaaagggagtgtgcctcaggatgagagcctccagccccagagcatctctttgcactttgaaaacattgtttgcaaaatacactattaagaatcaggggcctggagctacgcctactgagataaaatctagactttgcaacttagcactttgtagccttgtacatgttacttcaatcctctctatgtcaaattcctcacctgtatagtggagataatcattgcacagatttcataagtttgtgtgtgtgtgtgtgtgcatgcgcatgtgtcttcgtgtttgtatttttgcatgcaaaaaaagattaaactaattaatgcatatgaggttgttagaaaagtgtctggaataaaaaaggttcttaattattgttggatattaatggatttttttcattaacttttatgtgtgactgttgatattggtttttcatttaccgtggcaatacaaagtttccttggcacacatcgtattttatgttccatttattgttccacttatttaagttaaaaatgggttgctttaaagataaatattaacttcataatgttacatattgcccgcagttatgacaaagattgtgatactggaatgcaaatgactgagttttttagaaatactgaaatcatggtacccgccttgtgaaagaggttgtagagcagatctgcattatcaatatttaatttgccagttacaagcgagtttctcatttctgctagatatgagagtgatgtggattgcataatgaaaattgctaatgatcttcttggcttaaacccatcgccttcatctggacatcagataatgaaacttcccaactgccttgcaattgagctatcagaatcagagataccttctcccgctgtgtctcacccctctccactttttaaagcccagcttttcattccttagtggctcttacgatagcacggaagaaaatgtaagccccccttctccccaccccttggtgagacctcacaggatccatgagttcttcctgactataattttaggatggttcgttgtagaaatgcctgcttctgttcagttatttattcaagaaatattttttgagcagaaaccgtatgccaatcactgtgctaggcagtagaggtataataatatactaaaacttgcaccactcttattctcttatacctcacagcctagtggaaaagacatgcatttgtcaaataatcattgacaaccattggcaaaaaatgttcaatgtgaaactgatgaatatgagaaacaagagatgctgtgtaaaagggtatgaatagaagaagcttacctgattgaccttcacttatcaaacgtaccagattaatacatactgtcccatctctttataaagcatattggcagatgtgcacagcatcctatgtagtgactgtttggtacaaatttacctttctcttcacccgttgcagtgtctgcttgccaagagtcagttgtatttgttcccagggctgcttctgccagctgcacttttcattgtaattacattagttagtggaatattatgtaaactgatgaaaaatgagtgcagtaagaaaaagagctgtttctatgaaaactaaatgctttggaaacattgtatgaaaacacgattcaaaaattattttgcttagctgtgggtgagaagactgtaaaatattagtggaaaaaagccctcagaaatgtggaaagattctgcagtcagattcttttcaatgtgtcttgacattctcattccactttaatcaaacccagaattgataccatagagttaacaaactttaaactttttctgaaaaaagccagattgtgactattttaggacctgaaggccatagggtctccattgcccccactcgacactgccataatagcacaaaagcagccatagataaaatgaatgattgaggctatgtctcaataaaactttatttacaagaacaggcagtgggccatagttagccaacccctgctggtgactgaaatgttagtgaggtgtatgtgggaaggttaatgagggatttttatcaacagagaaatcattcaaagaaaaggccttagactcacatcaaagatcaataaatgcatgcacgttcatatgttttacattaaaacaaaagcctgaagttatttctatatcactttaaaagtgatttcttgctttaaaggcttccagttaaataccttctgccattctcaaatgaaatggcttttaaagaacagaatagctacaattagggctggaaacacaaaataaaattatgcttatttttatgttccaaccctaatgactcagaaccccatctgtctataatggaagaacaaatttatccttttttattggatcccccagcaagtaatttctgggactccccaaggagggtgacatttccacgtatacatcctggtgcttgtcctatgcaaattgttgttcggctgttccagaattctcccctcacttaagaaaagtctggtaagttccctctctggattgttctgtcctcaaaagcattcctctgtaagcatgaataccattctttgcattaactttccaaatgatcagctaaagccagacttcagtgattagctcaggggttagcagaaatcccaggtaggtggtgacttacagagaaccctcaggattcaggcctgagatcttcatggttgatgagatttcatgtatgttctcctgtgtgtgtgtgtgtgtacgtgcacgtgcacacatacaaggaaaaaactggcagaagtttgcttgctttaatcttacataacgaatggtcccaactttgtgattttctccaagcaaagggagtttgccccaaagtaattagttctctacttctagaagctgcaggaactcaggcaaatgatccccaggggcagcttctctagtaaaataagaaactcataagtacatttaaaatgttttttaaaatgttttttaaatgtcatcttcacaagacctgttccatacagagcttgtatgttctccagtctttgcaagaacattaattgatgaacgcaaggaaatcaacttcttgattgattctgatcaagaaatcagccaactagtcacagattttaatttctccaacttcattgtgaaatatgattaaataaagaagtgtacaggtgtccacttttcttcatttttgatgctgaatcttataattcacatatatgttaattaattctttgagtctccccaggcatttgaacactttatttggagaagactcaaaaaaaagttcacacatttaggatatttggcctaatattcattctccctttcccttgctttaatttagcctattatccccagtcctcatgcccctttccagggaaaatctattcccatttcttgctttatcattaaatctgtatcaaacagctccaagcaaatcgctaataatgctgacattttaatttgtcatagctactcttcatttctatgactgatgcctcagcaaggacttgtcttcctgctctgttcctttgaggtctaaataccatttcaggagaaaaaaaaatacgtgataggcaagggaaatagggcaggaagcaaataaatagggcatctctagttccctccagttgggggtaggaaggggcaagtttcagtgggaatgagtaaggagcaagaaactctcctttcctgatgatgcagacaaacctgagatggtcccaggaaaaatggcaacgaggccgggtgtggtggctcacacctgtaatcccagcactttgggaggctgaggtgggctgatcagcaggtcaggagatcgagactatcctggctaacacggtgaaaccccatctctactaaaaacacacaaaaaattagctgggcatggtggcgggtgcctgcagttccagctactcaggaggctgaggcaggagaatgccgtgaaccgagatcatgaggttgcagtgagccgagatcatgccactgcactccagtctgagagacagagtgagactccatctcaaaaaaaaaaaaaaaaaaaaagaaaagaaaaaaggaaaaatggtaatgagatataaaagctttctgtcttccttcatggccatagttaaaccttatttaccctgtgcttgtatgtggatgaatcatgggtacagcaagcatgtgcttccttgttgtctgcagtatatgcttccttgttgtctgcatccaacagacatttctgcctatggtagctagtactttattattctatttgggttaaatttcctctttcacgtgtgcagtcttggagagaggataaatcacaacacctgtccctagccaacagatgtggatatggccaaggcaggacagttgaattctttctcctgagactctgaatattgagtagggtaatgctaaatatggtgaagaaaacaagcatgattgaaaacctggagttcattcatttcggtagtgatattctggtgaaattgagtgaagagacggttcccagggctagacctcagattcaccctgattcctgcctttatgtttaaccctggttatccatctatccgtcccttaagctacctcatctcattcaaatgatcgccatttttttttttttttttttttttttttttttttttgctgaagttagtcagacctattccttttttctgtgatcgaagaatccctactgatacactggggaaatgtgctaaacttggagaactgcagagccaagagtttggttaaaggtttgctaaaagccaactcttcatcataccctgcaatgcctccctgatgcctctgtgaatcggcgctgactttatgtattgacagctaagagaaaggagctcttggtttagggcacacgcagggctagatgcttacctgaatttgtacatctttttgggtcagttctcagtcatcaagagcaggtaggcacaggaagagaggtctgtgcttcagggtctttggaactctgtccttccctgtaggagtaagatattccccccaaccccaggggaccacccccgtgcccacagataaaggatctgtatcagtatcaaagatatatcagtatcagaggaacttgtgatgttacgggatcatcacatgtctctctgccaacttcttccttctcagagtacccttcaaaggccactgagaatgtttataacaagtgccatttcctcagctctaccccagacctactggatcagattctggagatggacccaagggactatttttaagccatttctcaagtgggaatgagagttgagaatagtacttttcaaatttagctggtaaaatgttttgatgtctcagccttatcctaggaatgctattggcccttcatatctgtaggtttcatatttgcagattcaaccaactgtgcttcaaatatatttagggggaaaaaaaacccaacacacacctgggtctgcacggaacatgtgcagactttttgtcatcattccctaaacattctggataataactgcttacatagcattcgcattgcatcaggtattcaagtaatatagagatgttttaaagtatgtgggtggatgtgcataggttatatgcaaatatcactccattttatatcagagacctcattttatatcagcatccatggactttggtattcgcaggaagtcttgacaccaaggtccatggatatggaggaacaactatactaaattatcatgttatatgggctgagttgtgtcctgacaaaagtcatacatggaagttctagcctctagtaactcagaatgtgactgtacttgaagctaaggtctttaaaaagataagtaagataaaatgagtccataagcgtgggccctaatccagtatgactggtgttctttttttttttttttttttttttctgaggtggagtctcactatgtggcctaggctggagtgcagtggcgtgatctctgctcactgcaacttccgcctcccaggttcaagtaattgtcttgcctcagcctcctgagtagctgggcctacaggcacccgccaccatacccagctaatttttgtatttttagtagagatggggtttcaccatgttgcccaggctggtcttgaacccctgacctcaggtgagctgcctgcctcagcctcccaaagtgttgggtttacaggtgtgagccaccatgcctggctgggtggtgttcttataagaagaggagattaggacatagacacgcacaaagggcaaactacatgacccaaagggagatgatcacctaccagtcaaaggaggatgatctgagaagaaaccaacccccctgacacctgagtcgcagacttctggcctccagcactgtggggaagtaaatttctgttgtttgatttccctggtccacggtactttgttacggtagccctagcaaacgcacatctaaacctcgtgagaatcaaatacattgctactaaaatcaaaagcaaatgaacaaccaactaaccaacaaaaagccccccgaacttgatagttcatcctgatgtgtattggtacctctgatttaattacatattctaaatcctattgcccttttgaaatgcaattttaaactagctgtggtatgatactccctctgtatgtgcattttcttgtttacttaaaaaatagtggactcccttgggggatagagatgatgtccttggctccctgtgtgtcaccaccacatacaacaaatcagatggacgcagcaatcctctattgttcgatatggatggagaaaggaacagatgagtatgtgagtcacagcgtgttacttggtttcatctctggagtttacagcctcctgtgagaccaattctgtatggagacgcatttgtaaccttacctaaatgagcaagcaactggtgtttggaagaatgcattctaatatttcatggtttagtgcccctagcttacttagaaattttgcttctatctagctttcttgtagcgaaggtagaaggtgcccgtgtggtccttttagggatgatctgatggagccgtgtaatctgctttcttcaggtgcacgtctcatcttgaatgccacctttcccctgatacactccacctgcccactcgtgttcagcatcatctccaagcaccctgcctcgttcctctgtccacatgctccatggttttgcatgggtttttctgaacctgcttctgcagcaaagctgccatctatctaagacgctgaccctttttaataccatttttctaaaattgacaaattaaaatggtatatccttattgtatacagcatggtgttttagtatgtgtacattgtgaaatggctaaattgaactaattagcattgcatgacctcacatacttaccttattttttagggtaagaatacttaaaatttacgctctcagcagttttggggaatataatacgctgtgattacctgtagccgccatgttgcacagtagatctgatgaactcattcctcctgtctaagtgaaagtttgtattatttgaccaatatctcctaaatcctccagcctccaagcctctggtaatcaccattctactcttgcttttatgagtttaatttttttagacgctacatggaagtgagttcatggggtacatgtctttctgtgtaaggccctgatccttatgtgtttttcccccacagtaacttgtgtaaaaccctatacccagagaataacaaataaataacaacaaaaaaaaactattaccaattgaaatggtttaattcactccaagggggaaaaaagttttgcaaacatctaagtcacttcagagtgttttgatagtatttgcatgagaatcttaaagcctatagtcattaggcacaaacaaatgctaagcaatgcacatattagtccagagattctctttaattcacacttagagaaaaagggaggttaagagttagaaccatagctaattgtggagctgggaattgaacccaggtctatattcacttgttttgacaaacatggtacgttaccttgatgtctattgagattgccttagctcaaggtaagaatgcatttgctttttagaaaggagctaaaatgatcagtcccattgtgaggctaagatacgagaagggtatggttttctttattgatttggactttggggttagacctagcattgaggcccaacctttgtaggatccaactatgacaggtggaaaatgcctcccctggttagttagaaatttaaatagctaccaaatgagctgagtattttatgtgcaaagttttaggtgctaccagttaaattatttaacatctaccttcttgaccctgactcataaagcggggggtgtttttgttaaaagtgtagacaatttcccaaaactatagcagcaattatagaaatctatgtgttctaatttaaggtccttccacagtcaggactgaagtcactgagtggattggtggttgaaatcatttcttctttgtatgccagggttttccagggagaaaagtgaaagaaaacacaaaggtttggttcaataagaggagcacttgatgtcaactctgtcttcccagccagtgagtggcagaatccttctatttctagccatttacttattttgaacccagaccatttattttctaaaaacagattactcatgtggtagtttatataccaaactgtagaatttttcattccaaagacacatggaaatgcctctttatgctcctaacaaacagtaacagattatgcacacagagcatctactgtaagtaaataataataagttaagctgaagggacacacacagaatctataccaggcatatctgaaggggaactcatatgccagcggcagccttccatgcttgtgacatgggcccggagaactgaacaggtgatcctttcaccaaacccagagggtgatcttgaaaacttaattaaagcagagttcttccaggcagccgaaattattagttcagagttggtactcatgttgaaatctgtgttagttttttattgtggccctaacaaattaccacaaaaaaaatagtggtttatagaacacaaatttactattctgcagttctttaggtcagaatttcaacaagaatctcactgaagtaaaactgaaatgtcgccaaggctgtgtttcttttggaggctctaggagagaatccttttttttttttttatcattctgattgcagtcagagtccaattccctgtagttgtagaactgaggtccctgttttctttttttgttttctttttttattttattatattttaagttttagggtacatgtgcacaatgtttaggttagttacgtatgtatacatgtgccatgttggtgtggtgcacccattaactcatcatttagcattaggtatatctcccaaagctatccctcccccgtccccccaccccacaacaatccccagagtgtgatgttccccttcctgtgtccatgtgttctcattgttcaattcctacctatgagtgagaatatgtgttgtttgattttttgtccttgcgatagtttactgagaatgatgatttccaatttcatccatgtccctacaaaggacatgaactcatcattttttatggctgcatagtattccatggtgtattttactgggtgtgagctgagggtcattcctagtgtctagagggcgccattttttttttttttttttgtaattcatggctccttccttcatctttaaagccagccatggtttcatgaatcactctcatggtttgactctctcgtgcctcttcttctgttgtatctgtcggactggtttctctcctgcttttaagggttcatgtgattacgttgggtccacccagattatccaggataatctccctattttaagatccgtaattataattccattggcaaaatcctgtttgccatgtaccatagcatacatagatctaagatcagccagccaagattgtcggtccaaaatcatgccacactagttatgtagtatccccactctaagtagactgattctccatgtgtattcaaacactgcagacatttgatttgtgttctgggatggtccacctccattttcatataaaatatagaaagtcagagaccagagcattcagaactaccatccaaggtagcccagggtggccattggcccaggactcacctctacctgccttttgaacttcttcttttgcagtccctactggcattcattgcttcaccatttaagtccagctgttacaaaagaagcattgttagaatgtctaccataatagtactgactctttgatactattattattattattatttattattttgagacagagtttcactcttgtttcccaggctggagtgcaatggtgcaatctcagttcattgcaacctctgcccctccgggttcaggagattctcctgtctcagcctcccaagtagctgggattacaggtccctgccaccacacccagctaattttttgtatttttagcagagatggagtttcaccatgttggccaggctggtctcgaactccagacctcaagtggtccacctgccatggcctcccaatgtgctggggtttcaggcatgagccaccgcgcccggcctgatactattttattacttgatagttctgttgatttctactcacgaagtgtgtcaagtaaggtaatgagaatgtagaaatgtaaaattattaaaaccagaagcatttgtatgtgtcacttaagtgctaagtaaaacacatgaatgaatgagtgaatggatgtttctaaagactctaggagatgtctgtagcagatggcatcagatccctgacattattttatcacccactcctttatgtcaaaagctggctatgaaaaacacctatgaacctatatattttttaatcctttaatttatttattttttaattattgttttttaagttccaggatacatgtgcaggatgtgcaggtttgttacataggtaaacatgtgccatggtgttttgctgcacctgtcatcccaccatctaggtattaagccctgcgtgcattagctgttttccctaatgctctccctcccatcagtctccccaaagaggcccggtgtgtgtggttccccttcatgtttctgtgtgttcgttgttcagctcctacttacaagtgagagcatgcggtgttcagttttctgttcctgttttcgttcactgaggataatggcttccagcttcatctatgtccttgcaaaagacatgatagtgtgcttttacactgaacctcttcataagggctatttttctggctatgggacacattcctttcacggcctgggtaagcaagaagcatcatggaattaacaaccctggaaaaagcactcaactgaggataaatggggacttagtggatcgtgccccagcttcctcatgcgctagagtaagtggggcagcatcgaggtgtgttctgccatctcccagagctctacaatgggattaagccccagttgcccatagtgggcacttgctcgttaacaaaaattgtgttcctcctatccatgtctcaatttccattccccattgatgttcccttacatcactccaaaatgtagaatttgcgcttgaattttaccccagctctgctttcagggaaacggaaactaaaatagtacattcgccataatgagaaacaccatagcctaataattccatcaagtaaggttttctgatcagtggatattctcatcatcatccttttgccatcagtcttttatccctcctcctctttttcctctcttgcacagtacatcactgctgttgtaggatgtggattcttggattattgaataggtttgcaagcaactgccgctgtgctcatggtgcatttcccaaaagttaaaaaacttgagtttggctcactgagcgatcagagcacgaggttttgatggcacagtgtcttgctcacatatgaggagactgatgtatttgctgccacattccactcatttatacttgcctcagtgtggtttcttatttgcaggttgcttttaacaatatagatgctttcctggatagagaacatggaggcatgattttggaaaacttgtctgcctcagatgcacccacgcatacacagatatatgcatataccgagtattctgataacaacttagagatttaaatatttttggcaattttgtggtgttattttcaggggttgtatattcttaatcttgattgcatatgtgtcttgacatctttacgccaaaggcatgtttttatagatgtctgaattaaacactgaactcttttcaagatagctgagtttacgtttaagtggttttgattaacctgggtttgcttatttgctcctaaatgttctaatgcagagccatctcccttggcatgaagtgatttgggagcacagctttagtaataatacttttctaagtaggcaagagcatcctgccctgaatgtttcccaaaactggccttaaactgaagaattgaggtttagccatcccccttccccttagccattcaggtggtgcggattgggaaactggaacctaactgcacagacaccaaattgaccaagggtgacaaaaccagcactgacaagactgtggttgttgggtaggtgaagggttcatgagctagtaagcaggactcagcttggaatttggaaaatccttagtgcaagcaattttgcccagagtggcatgttgtcaagttgtcctcaagctacatttgccattaagagaaatgaacttcaaaaaacagcatagcccttcacaagcctatctttactcaaagcctgagaaaggagggtcccatctggcttaacacattacaatttcttcacaagtggagcttctcggctgctaccctgaagcttccgttttgactagtattggttcttaggtatcacagaggaattagattattctaaaagcttttattgagcatatactacatacaccactaggagaatagtaatgtcttgctctcaagggctgtgcattctggtaggtggtgtgaaaaggtaggtatatgtaattataatgccaggaaaaagaaaatgcgatttgttagtcatgaaattaggtgttagaaaagcgcagaggagagtattattacccctcctagcctcctagctgcaggaagtgtggcagatcatttaaaggatatatatgtattacatacatattatattttatgtatctgctaattcttggatttttgaatagatttgaaagcaactacaacttgatcacaaattgttgttggggtcacaactgaccccaacactaatttgcccagatatgtgtgtgtgtgtgtgtgtgtgtgtgtgtgtttgtctgtatacataacctgggtaatttatacatacatacatacatacatatatatatattttcccagtattgaaatactacctgaattctaggtccctatacacaaaaagttactgtttattttaacttaaatatcacttagacatcttaaacttcatatacccaaattcacactcatcatctgtgtcttctacacacacacacctgcccattaatctgctcttcctcccttatcatgtctttttacaacagctcctaattcagttgttgagaccagaagctcagctgttgctcttcactactacatctttttcagctctaccttctcctttagatttgtgattcctaatatctcttaagtctatgaattcctctcaaaattcactctcgcaaacctactcgaagtcataacgatttctaaactagattatttcaatagcattccaactttctgacccgttctctagtctttgttccttttacggtaaacatgtatcttgagctgcctggaacaatagtagttacaactgttgtcctggtataattattaatagcactttcttctttccccagaaagtcctggtttggagaataaattatgatcactgaaccttctattcactccttagggccagaatgacctttaaagagcttaattaatgctactcttattcttcattcatcactttcattacagtgcttatcaccttccttacgcttacccacaatctgttattccctcgtttgttttgtggtttacttggtcatggtttctcgttctcctgtcttcttactccctttagattgactcctcttaagggtaagagaatgcttattttgttcttaactctactctctactgcctataacatagtagaaactaaatattaatacatgtttgcaaataccagtggctattgttttttgttgttaatacaatgaaagaatcagtatgcaccaataacataatctggctacaagataaccgttattctagaaagctgccctaggaagagatttcagaatatttcagaggatcttctgttttttgccatgttagaataacttgtaccataaacaactttaatactggacaaaatatatgaagcatcattttcaggcaatgggtacaaagcagcacagagctgtgatccttcagagaatcggagacatgtgagatgaagctaccgttggcccagttttattcctgggaggaacgtcttgaacataagtgctctgagatgaagaatttacaagttggggatgaggaagtagctggaatttgtggaaccggttgctacagaaaggacagatctgtgtgggaaggagaagtctccatgccctgagttcttggctgaggaataagccacttatgtgcagggtcaggctttgtgagtcctcacagggagggttaactgtgacacagaggccagggtagaggtagtacaggttgtaggtattcagttgagactccagaaagatcagactttaggagtaaagtgtgtatcttagggcaagggtcagcaaattatgctctgcaggcaacatctggctatgggctgtctttgtagtctgtgatcaactaaaatgggttttagatgattaaaacttaataatatgtgactgagactattttacctgcaaagcctaaaatttctactatttggctcttttcagaaaatgtcagccaatcccttccctatatgaaggggcatggcccatgactgtagacaaatcctaagaagatcttcccaacaaagcatgaaaatgagctttacagggtcaagagcatgcatgagttagccgagcgctgccagaacaaaactcaaccaccatttaaagaaagacgatataattcagaccccctacaattcgttctatgtattgaaatccacacaattgaaatgtccaatggtaaatgtccagtaatgataaataccatggctggtgtggaggctcacacgtgtaatcccagcccctttgggaggtcgaggtgagtggagcacttgagcccaagacttcaagaccggcctgggcaccatggcaaaaccccttctctacaaaataataaaaaaaaatatatacaaaaaaaaattacacaggaacggtggcacatgcccttggtaccagttactcagggggctgaggcaggaggattgtttgagcccaagaggtcagagtgagctgtgatttcatgactgcactccagcctgggtgacagagcaaggcattgtctcataaaaataacaaataaataaatactagatgtgtagaaaagaaaaaaaaattgactgacaatccagagcagtgtttggcaagccacagtttatgagacagctccctgtttctgtaaatattcttatttcattggaatatagtcattcctatttgtttccattttgcctatggcttcttttgttttgtaacaagaaggttggacagtttcaacggagaccatatggcccacagagcctacaatatttgttttctgtctcttttaaggaaatgttttgtccactgattaggagaaaaaacagtcagtagaaagggactacaagatgacccaaatgttaggattgaagtagacaaggactttgaaataactgtttgaaatattgtagggtttataggaaaagatggacatgatgagttcgcagatgggaagtctcagaaatcgaatgaaaaccataagcaagaaccaaactgagattctgttaggttgatgcaaaagtaattacggcttttgccattaaaatgataataattaaaataatggcaaaagctgcaattattttgcatcaacctaataaaattgacagtacagtatctgaaatgtaaacatcagattgtaaaatgctgaatacagaaatctgttaacttgaagacagtgaagaatagaactaaggaacaggaagaagaaaaatattgaaaaaaattgaaaaaagcctcagtgatttatgggaaatatcaagcatttaaatacatataattggatttctgaatggagagaagagacagacaatgggacaaaaaaccattttaaggaataaaagctaagattttccaaatttggtgaaaacatcagcttatactccagagagcatggggaaaaacaagcagtataagcataagaaaaaattatacctgaaaacattataaagaaatgcttaaaaccaaagataaacagatgcattttcttttggaaaagagatctatatttgtctattgcgcaacatatctctgtaatgagtacaggtaactaagttctctaaagccatcccccagtgagacattgtgaaaacttctgggattggaaatggtgaggttgggaagaggtaggggagctcattgagagtagaatcaaagggaagtcaaagggtgagaattaaagaaaaagagaaaaaaggggcaaaggaactccccaaagcgtaaaagcaacatacggcaaattcgatagtagccaagatgaagttctgtgttatttgaaatgtgtactcatggggctgaggctgtgcagttgatcttactacagacaagttggttttgttctgttgcataggtacagactgcagtgatgttgcatatatagggaatccacttctgggtaccaacagtaaaagtgcttcattgctcagtgatgatcaaaccgtcttcaaatgcaagcagttattggttttagttaacaattatttatagagcactgagaggttgcccaaaagaactctaggagaagagttgggaagtcaaaaactttcagttgctgtgttgccttgtaacagtgtttgttagcatacatgattaggggaaagaaggataaaacagttgcaagtatttaataatctggaagttttacagaaatatctagattttttttggcttctctttaaaacaataagtattaaaaaataaaagcccacacaactttgggtttgcatttctttttattttttcttttttttatttatttttctttttttatgagacggagtctcgctctgttgcgcaggctggagtgcagtggtgcgatcttggctcactgcaaggtccgcctctcaggttcacaccattctcctgcctcagtctcccgagtagctgggactacaggtgcctgccaccacgctcggctaattttttttatttttagtagagacgggatttcaccgttttagccaggatggtcttgatctcctgacctcgtgatctgcctgcctcagcttcccaaagtgctgggattacaggcgtgagccaccgcgcccggcctgggcttgcatttcaacatgtaaacaatttcctgtaactgaataaccatggctttatttgaatgaggcatactacactttgccaccgtccttgcacttccctattagtcccctaaactgacaccagttgtcagtttctatttatcctcacacttgggctttttttttttttctttttttttcgagacgagtcttgttctattgccaggctggactgccatggcgcgatctcggctcactgcaacctctgcctcccgggttcaagtgattcccctgcctcagcctctcgagtacctagaactacaggtgcactacctgctaattttttgtattttagtagagatggggtttcaccatgttggccaggatggtcttgatctcctgacctcatgatctacctgccttggcctctcaaagtgctgggatttcaggcgtgaaccaccactcccggccatttttttctttatggtagaattaagtagaaatgaaatcatttattttacccgagtctttgtcaaaaccagcaaaagaaaagaccaagaagagtcccatgcttgagaaaaaagttaagaaaataggatataccagatttcttggtggaagtgtaaaatattttcatatgcctaatatacaaaaaataatgccatatcccttctcacttgactcaaatggaacacctgtgggatgcctgcagatacttgaatttcttcaaattactgctttagcaaaactttatttttgcacatgaaatttttttcctcccaataatataccatcatactaacaaaggttaacaacacaaagtgtaaacaattctaaataccaccttcccatttctaaccaagatgttcactcgtaacagtgtatgcataatatgaaatgaccagtttaaacttccattccaatgtcatggtttatatgcccactcatatacctcctgtgagccctggggataatgacacagtttcttgtacaatttaagtggtgtcacctctctggagaccagtgaacagactgctggttgttgtcttagttaaacacttactttctaacaattttctaacattgcatttctgaaacagcttggaaatgtgcagtgttattgggtgtacgcgagagaggtgggcaaagacatccatctgatttcttggaacagggccatttagttagtggacgagacctcagaggttttctttgcacagacttctcctgatgcacttataattttctgcccagaaatctcttcaaggcctgtggagttttagctctgggggaattattcctctgaataagcggtttcccagctgcgcacataatgctccaatcaggctagtctttgttcagacaatccatgaggggaaatgttggcattggtgggcaaggtactgttagccccactgtctcaaagtacatcggtgatgtccatgtgtaactgaccaaagtaaatgcagttttgcaaactgcaatgagttttacgtgatgaattttcctacaaaagtcaaaatgggaaattcaggttagtgtaggtggtgaagctactacatttattagcatcaaaagcacagagtctcaaagacgaactaatctgtgaataactgtgccattagtaagatcataaacatggactaatggggatatggtacagtgaaatgctggtatttgcagcctgtcatcatattagtacaatgatgaaatttgctgctaagttcctcagcaaatgttcagtatcatgtttgtgcctttttgttataatttgtaccgtattagtagcaacttaccatattagtgactttaaaatgtttttaaaattatatctgtcgggttgatagaaatggaatgttctggggttgtgcaagtattagtcgtattaaacttgtcctgttagcagctttcccttgaactgatacttaaatgaggttttgatataaacaaaatgtgcttctgagatgtgcttccagctacaaccaatttctcccagtccattagctactttgtatcccttttaagcaacttgagattgtgcttttattgaggagccaaaatgtttgctcaactcattaggccaaacagagagaaagtaaactcaagggctgtgctgtctcctgagttactctggggcccggtgaatggagcattacctccatcactgctaagacagacaaacaccttttgagattttcctgcctttgcctctctctaccacttgctcctcctcctctttggctcatgagaaaggctggtaactccactgttcattctttctcatctttagtctctggatttcaaaagtcatcgttttcctgcagaagaaggagaaaggagcattgaataggcaaaccagctgatgtccactatacagagttttttggtgttagaaaagctggtttagaaaccaccttaggaagtgacctaacccagaaatggtttatctttgtaaaatggctttctcttgtttataaccaaccccatatactttatttatttatttagatggagtgtcactctatcatccagtctggagtgcagtggcacgatcttggctcactgaaacctccgcctcccggattcaagcggttctcctacctcagtctcccgagtagctgggattataggtgcctgccatcacgcctggctaatttttgtatttttaggagagtcagggttttgccgtgttggccaggctggtctcgaaaccctggcctcaagtgatccacccactttggcctcctgatgtgttgagattacaggcatgagccaccacacccagcccgaccctattttttattttatcttattttatttattttattttatttttttttgagacaggctctcgctctgtcacccaggctggagtgcaatggcatgatctaggctcactgcaacctccacttcccgagttcaagcgattctcctgcctcatcctcccgagtagctgggattagagtaatgtgccaccacgcccagctaatttatatatataccttttttttttttttttttttttttttagtgaagatggggttttaccatgttgtccaggctggtcttgagctcctgacctcgtgatccacccaccttggcctcccaacaagaccctattttcaaatgaggtcatattgtgaggcactgggagttagggtttcaaaatatcttttttggggggaaacatggttcaactcatgacagcctgaagtctttatttacgtgtatctatcccatatggtgtaccattctcaatcagcaggagccatacattgtctgttgctgtaggattataatcagactcactgacttcacttcctatctctgcaccatccaggcgcgggactgcatatgtttattggccaaacccagttttacttgctcatcatacatctggctctgccccaactggagcttgcaaactgagggttgggcaggggaggtttgttaagaggagaccagtgcatgttcctaaaagaaggggagcagaggaaaggtatgctgagcaggtacaacaaagaaaacacagaatgcttcatatggaaagttctgcctgagcagaaccacagtttacactgtgtacctgcattttgtcatgcagcacaagcaagaatagagggagctattcagcaactcacagtccttctttgtcaagttcagattgtaaattcttggagtatttagaggtggtgtcacatctgtttctctccctctgtataaagaaaaataaaatgccatattgaataagtacctcataaagccttttgcgttatgatggagagacagccaggaagatgagagtgaaaagtaaacattttcctgcatggcaaatggaggcttttgagggtgcttgagatgtttaagctcttgtcttgatctaggtggtggttacacagggtggtgtttgtgtgtgtttgtcaaactgtacacttaagatttgtgtgctttaaccccatggttgctagtggctgtagggtgataatgggaagttattattaagtgagtgtagaattccagttttgcaagataagaaaaagttctgtgggtggatggtggtgatggttgcccaacaatgtgaatgtacttaatgcagctgaactatgcatttaaattagttaaaatattaaattcattgtgtatatatatatacatatatatacgtatatatgtatatagatgtatatatatatacatattatatatatacatatatacatatgtatatatgtatatatatataaaaccacaatttaaaaaagactagtatactttactatatcaatattattcctcagccaaaaagtaaaagtaaataaaatgtcccattcccatttgtttttgggagtcacaagaagggttgaactgacctctgatttcatgcagcgtggacaggcaattttagggatctttactgcaatatctcagcagatagctgaacactggcataaatagattatttcctccaatgccttgcctatcattctgtaccttcttcggcttcctaaatcctagcaacaagtaacctgtctttatcctggcagaacggtcttcactatgatttcagtgccaaagtaatgactgtttgtactgaatacatgtaacagagcctcattccttagggaatgtgtgtttttccccttcatgtttgttataaagtttgcagatcaccatccctgtagtcacttaagctctctgacctgttcagagattcctcagcaatttgctctctgggtatccttttttcatggtccatgttctcttggggtacactcacaactttatttttctagctgcatgctgccattttgggattggctgccatatgaaccctgggtgttagggtatgcttcccatcacagatgacattgaatagttcaaccctctccatctctcctcttgcaaggtatcatcatcattcattgcgtggaagaccacaacaaactcttgactggccttttcgctgtcactttgcctcaaggccacaatccatcctcaggaccaagggagcctttgaaataagtcattccctccttgacgttcgttagcagtttctcattgcttgtggagcaaaacacagatagcacctttagtaactaaagctctgcatgaactggtctttacctcacttcccctcctcagcccttgcgagttgctggccgtagccacactggctttattttactttttttgaggcagagtctcactctgtcaccaaggctggagtgcagtggcacgatgttggctcactgcaacctccacctcccaggttgaagcgattctcctgcctcagcctcccaagtagctgagattacaggtgcacaccaccacacccagctaatgtttgtatttttagtggaggcagggtttcgccatgttggctgggctggtcttgaactgctgacctcaagtgatccaccagccttggcctcccaaagtgctgggattataggtgtgagccaccacgcccggcccacactggccttattaacatgcagaacatggtaatagtgttcattctactaaacctgtttgtgtgtttgtgtcctaaactttagctattataacttggccactcctcatgggggaatcaaagggaagctgttcttggctttagagaaattcacctcccaaggctagaaaaatagaagcactcatttctcactaatgatgggaatgagagtagtgggagtttttatatggaggacattatttatgtactttttaaattaatttgttcattgactcagtacaaattgatcatctcactacacctgtgttgtatatctcaagagttgggtagtcaagtgatagttttattattgtctatatttcataattatttattttaaatatttcataatgagtaattttttaaaattatactgatcaccctggccttggtaacatggatgatttgaacacctgcctggagaatccaataataggattgctcttattgatgaactaatatgtttaaccatcttcctgttgaggtcagtctttttagtggcataaatattccttccaggcagtggagtttgggataatgtagtagaaattgctggagtttctcctaaaggagaagaatctgtgcttgctcctgtggccacagagatcacaactggaaatgagcagccacgtggctgaaagtggaagaagcgattgaattcctcccatcctctctggttcatagtgatggtcggtggtaaccaccccaatttgcaggatctgggagaaccactctggagatcactccttggtatcctaattccctgttatctatcttggtaaactccagccttctggttggatattttagctactgcaacattgaagacctatggttcaggatgaatctaccttctcaggagcttcagttgtacagaatacattgtcaagtgatgtcctgtaaacacatattaaatgaaggttccaggctgggcgtggtcgtttctgcctgtaatcccagcactttgggaggccgaggtgggtggatcatttgaggccaggagtttgagaccagcttgggaaacatggcacaaccctgcatctaccaaaaatatcaaaaattagctggatgtggtggcatgcacctgtggtcccagctacttgggaggctgagatgggaggatcgcttgagcctgggaggtggaggttgatcaaacctccacctgggtgacagagtgagaccatgtctcaaaaaaaaaaaaataaaaattaaaaaaagaaggtttcagcactgattcagttgagtttatcaagtcatttttcacatttcgttcagtgtttagtaacacaactgtttaatgaaggcttgcagactttctttcataaagtttaaagttgtatgctgattgctgtatataattaatgtatcacaatggcattcaatttctgtagcagatcagaagccactgaaacagagaggccaccagtagcttaatcagtgttggtttcaggctattgctttgcagttgattaattattgtgttgagttgataactgataactggattaattattttaaaataatttctcttgaagcttgacaacaagagttgtaaatgtttccactgtgaaagcagctctggacctaccagcctgcttgtaaatatggaaaaaaatggttttgaattgaatatttgaatatatttactttgttattaaaatgatttaaaatggaaggttttgggagtgacaataaatagaaaatgtcactctgctcatttcaaggaacaaggtttgaggaattgattgaatcatcaatttggttatgagcagaatttaaaacatagaaataatttgctgacaccccccgaggggacagtccacggaatgttccattccgtctgtttaacctctggactccagagtacagggattgtaacacctcccacacttgattaatgggaaacagctgtctcctgcttgtgtcacagtgataaaatgtttctccatcttagggcgaatctcattccttgcagagggaccacatgttcaagcaggtgggagaatgaatgggtgcaaactgagcagaggcaggaagagcataaccaggggactcatttaggctcacagaagcttaagattaaatataaaaaaacaagaaatgacacataccaatccactggtgtatcagaggccatgaagtatagcctgtgtacacccctcaccgtggatcaaatgggtttctttgttggctttctcagagcttgtaagagaactcagtctgctaactcagatgcacaagaaacaacttattacattattcatttttaatcagtttaattttaaatccagattcttatccctatcaggcaaaatgttcactttcagctatttcactcctttcccttttcctagagatgggcaagagcctgggagaaggtagtgcccagaaggcaccgtgcatgggtcagttgttagtggttgccatggtgacatttgctttcaggtacacatagtgcatcttggcttggtggctcccttggttctctaccatcctgaggaatggtgactctgtggtgaagctaggaaccctatcacttagcatcctgcccacctagaggtaccatgcagctgtttttttcctgggacccagagctgtttgccccgctcacagtcttgataccctgtgacctgttaaaggccctaacactctcctgatcatctttcaggtcatttaccctaatcccacccgggggcttctgatcaaacgtctgcaaagcatgggcaaataaatgtgtgggacagacctggtataatacaatcaaaatatggaaggactgtggtaaacaggagagcatgattcaggtccaaaggcattcagatgcaattaaatataacagaacactgtgctggtcaaatggactatatatgtatatatgtgtgtgtgtgtatagaggtatgaactaatatatatgtatgaaatacatatatacacacacacttatatgtgagggagtagtggaggagggaagaaagaaaaaaatgtggatagaaaaaagcatattaatatttgaacaaataatcttgctatgtacacctcgaagaggaaaaaagaaaatgtgaatttgcatggacctagtaatgtcttacttagagagatccattctttcctttagctgatttcagaaggccacttgtgagaaatagtgccccatgcagcaatgccccaaaagaaaggggaatgtcaaggtgctgcctcataactgacttcagtgactatgtgagaggtataaaggatttcagaggtggtgatacatttcttcaaattgagcttcaaagaccagaggctgattggtctcctgtgctcacttgccctaagtgaaatgaggtttctccgtaatgtagaataggtgacctgtaactctcattgcagaaaatgagcattgagtgaatgtaaaatgtacacacaaccatgatgtgttcatattcccccctctctcatgtctgtctgtatctggcaatcttgtctgtctgtctgtctttctgtctatctatctatccatctatctatcttctatccgtttgtccaaccagccattcagccatccatccatttgtccatccatgcatctattcatctatctatgtatctgtctgtctgtctgtccatccgtccatccatccatgcatcccactaatatgtcagtgtcttactcagaatggaaatactgaagataaagtaggtattatattgtaaaagttctatatgaacgccgtatctaaagttgtgtgtgtgtgtgtgtttgtgtgtgtacttacatctcagatcaaataaagaggctacaaacataaatgcctccaagggccaggcctataaaggaaaattggttattctacttgccaaataacatctgattccatggattgatgcaaactagagaactggaacatgtttgtcacctaaagagaacagctgccactcagcaccggctcatggttatcactttgaaaatgtagaccttaccttgctggatcagccagtacttcaaaaaaaaatatatatgtgcaagttatttgaaatctcttggtttttaaatattggcaaataagttatgtttcaaaaaagtatcgatatattggccaaatgaactgcaccgtcagggtatttgctggcatggatttgaccgattcaccaccactgcatcccgggtgcctccacagagatagatacagagcacgtgttcagtagaatatttgtggaatcaatgaatgaacatatgcctgcaaaattttaaagagtagggtgcttagttatttttccctaagttttcctatcagaaagggcacattttgtccctgtgcaaattgagaatttgtggggatcatgtccggaggtgatctctgtcaccggaaaccataagaaagatgaattttcggttttttcttcactgtaatgacagagtgtgttcagaacttctcccaagtaggagaaagcaatcaatcctggtttgttcagatggtcctggttttagcactgaaaatcctgcatcccaggaaaccgttctgccccatcaaaccaggatggttggtgattcggttcttgatgctctgtgctgtgattcatgggctctaaaatgtactaagcagattggtcagtgtatgtgcctgattgagaacttgtcagttgagggctgtgttgttattttcttacctctctgagatagccagctctgaggctgtctccatcactgcttgttttatggcatggcttggtggtgattctctccatcatgcttagccagtatgcatcttgatgggactacctataggctattttaacaggttactcgccacccgtctcatgctgccaatgattccacagtttacctaatgctttttaattgtttaggttgacattttgccatgcgcagttgtaggtaaaaatttaaatcaacaaggggctcggttaagcagttttctctgtgtgccatgtaaaaatatcactaatggtcaaaactcagacctgagcaagagataatatttccccctctccccttctgtacattgtatgttttaatattaatttcttctttatccatatatcaataattgaacactgcatcaattaatatgctgggcaaattgcattccccatcctctcattcatgatgtgtttcagtaatggagataattttcaagataaagcatacaatttaaaatggattaaaaagaaaaactaataaaggaaaagtgatttatagaaaaaaattatggatactttcaggaaatcttagctgtgcttccaagccgatggattttgtaaggagagcctattgaaacgatcaagttttatgcctgctgcaaaatttcctaggtctgcgattgcaaagagagggagggaagaatgtatacacacacacacacacacactttaaaatttggtcttctaatgagggcgtgtgtatcatcttcatccttagattaggaagccacagattcatgctagcaagtcttcttgaagctttccatttgctgggcttagttggtggggcttggttttttgcttttgatttgctgaattggcacacaggcttctgacggcccatcccccggccctccttcccttttcccggtccacaccctggctgagagccctgcacagagatgggcaggcggcagctgcagcgatgggcaggaccgcagcctctgagcccgcaatgacaccgtggcgtcggtagatggctgtagacaagtgtgctgagctgtgcggtgtgaagagtaatgagtctggggaggccttgacctgactggatgctgcttttatctgaagtacatttaaagagataaaggggaagccgggttgctgcacatgttcttttctctgcggctggagctttactttgagtttaaaaaaattctcagatgctggcctcccagagtcaccggctctgtgcagatgggcttgcctcaagaggatcggccgccttcctgtaaattccaccagtggggcttccgtgaatctcccacccgccatcaggaaatggtgtagtgcctgtctgttgatgatcaacaccatcgctagtattatgaatattgctagtatcatcagtttttgttttcgccactgtggctggccgcctaaagtgtctggatttgctcattaaacagccaaaccaagaatttgttacctaagcaggcttgacagaaaagagaagaagggcaagagttaggaagggaaaagagagagagagaaggagggagagagggagggagggagggggagagagagggagagagagagaggcagccagaagcaagtcacatcacatacagtgccactgaaggaatgttatcctcataaactcataaacaagcacaccaaatcttgtgtaaggaaagaagagggtctctaaggacttgacaggaaaaggcaagattttctacccactgctttcagtttttcttccagatactcttggtgaagtaaggagacttctgtttgctgacagagcccttgatttctctttcaagatgatgatgtatttgtgggtaggtagtgtctcttcctctgtctctctttctctttctctctctctctcgctctctctttctctctgattaataaattgactttggggataaagattgcagcccagagtaatcgcattttgtgtaaggtgattatacttgtggcagaataatcttgcactggtatagtacatgtgctcgcatttccagtgggagttcaggcaagacctggttcattagcattaagctgcaattttattttcagttgcaaaaaggaatgacaaaaaaatgtgtatgtgtatggggtttggggggatgtacggttttctgttttttgaaaacattgatggtggtgaattcagaaaaaaggtctagggaagtcgggttagacatgaagcaaatcctacatcacttgtagctgtgaggtatttcatttaattaccaagaatgaactgctctgagtagtgatggctttgtttatttgttttgtttttgtttctgtttctctctcacaagtgactacttatttgtcattttggggttgagtgctgtagaggagagtagcgtctttcatttgctttaaccagatgtgtgtccgtatgtgtgtatgtgagagtatattttacaagattggtcttgaaaaaggtagatttacatgcacttattctggctttctgataaatactctgtagttgttttttgttgtttttttttctggagatcgtattaaaataagagcaatgaagtggtaacccgtagttatgaattacaatatttaactcttgaagcaagaaaaaaatagtaatctagcatgaatggtttagaaaaaattacttattatgttttgggagacaaatatatatcctagtgtagtttagccaataaagagcatgtgtgaatttcttatgccagtaaccaaagtccttgctctgtgatttcaggtttagagcaggtgttccctgctttgccaagggagggaggcgttttcgaggttcaactcaacctctgtctttcatcagcatcatcatcactgttgtttttcgttgctcggcaggcttagaaaatcctctttatccgcttccctccagtccctgctctggttcaactcagatctatgaactctctttgctgtaaaggaagaaggcctttttgttgaattctttgttaatcacattggttctttgacctctgctggtctctaggtctgccttgcccctcagtgagccttgtcatttacacccttgccccctttctttgggacattttcctttgtagcgactttagctccatttccacccggtttagttttgcacaatttagtacaatgaattctggcagctggagacagagtttattattattttgtcttcatttcagggcaagttttctcttcgagcttgcgtatcacgaaagaggtattttgaaatataaaatcactagttaaaactgcatgaacttaatagagagttctatctaacaacactgaattctcataacatttatttttgacagtggaggttgaagcaattaaaattttgaatgtttacaaatgctgatttttaagcattaaaaaaaagtagtcacgtgggattgtcgcctcaataattaaggaaaaaactatactagcatttcatggaaaggagcctttttggcttttattttgtgaacagattctggttaattataaacaaatatcaataattcctttaggctgtggtgagttggttgctagtcacactctttctctgagttgttaagtagtgtctgtgatattatttatgaagtttgttagctcttacatatgtacatatttgcaactcaaagcagaggaaaaatgatgcgtgtcccagacccccttccacatccgaaaaacttgctgatttgtttcctagtaattaatcttgacttaaaagcagcatccctcaatttctattttcttctctcagaccaatgcattttagggctacatggctttattaactgcatttatcacattgaaaaatgggcactaccttcctttcctgtgctcaagtattctgtttacatctttaattcagattttttttctgcattcaaaaaaaaaatggcagagactttaaattggaacagctggatgcaggctgtttaaggagatatgaattagcaagctagcattaacactgtgaggttggaggggttttccattcttttcttcttcttcttttttaatgcagaggttctgctcttgccttctagtctgtaaataaagatagtctaaatgtggttgatatctctgtttaagagctcatcttgctttaggaaaatgagcctcagctacattgatgtgtgaaaatagtggttgctactgtctcatggatataaaagtgaaaatgaagagacaaggagagacaataaaatagaatccatattcagtttactcctgtcattgtttcttaaatttgtaaagtaacctctttatatgcacctatctgtgttaatagcacacgatttcagtatgtttttactaagatggaaaactttttgctggggggaggtgtggggtagatggtatagtctcccttctctagactgactttgtcattttagtctataaggatggtcctgtgtatttgaaaggtaaagaaatgctttggaatcgtatcaattaaaaatagtgtggccccattaagccagtccaattaaatagttacagatgcttaatatgtccatcatttggtgtcatctcagatttatacatttttttcccttaaatttctttaagaaggttttcctatcaaaaataaattttgtagttttcgttgtattttattttccctgagtgagtacaggttgctgtacaggggaaagaaagttgagttctctgcaaccattggctgacttccgggcggttttgattcaccaaacttggccacggtaggagggggaaacagccttccctacggacttcttggaaaagcagggaagtcacgtttactgaggatgtgatctgagctgagcaccaggctacacttgccgtagaatgaagtaaaaccctcttgaccagcacaacctcccttgaccagcacaaactcctgctctcctgtggttatttaattccgccaggattagaggttctttggaatacaattgagctgtttctcctagggctggaaagtaggcaattggcacctactcatctaattcacaaacaggatacaaattcctctgccactcaagtcttggaccaaatggtccccgcttaaactctactacaataggtatttgtttgactttataaccttttcgtttctctttactttttagttggttgaaacaaataactctttccattttattatttttactcacattttctcatttacattccaagtacacttcctctgtttttactttaagttaaaatactgcaatttttaattttaactttactttttttttttgttacaaatttggtgttccatttattcactgaaaataacttttcttcactttatcgtttcacacttcatcctcaccttttaaaaactttttttttttagaaatatcattttatacaaacatacctgggtttaaaatgggagaagagcaacaagtcaagtcaagaatttctgagggatgttgaaaagacggggagagagttatgccaggcggcagcatctctccttttaccaatgtagttcagtcacttaaaaaaaaaaagaagaaaacgaaaatgcatcattttttctacaggatcctgagagtcctctacctcccagagtgtgttacacttggcagaaactccaccacccagacagctccagttctcagcctgctgtaagcaaacttgtgaagtagctgcctgtggcttatctctgctctttcaccccatcctcagtactgggggagcctcctctgaattctgcattttctttcctgaatgctaaagctttttctgatctgtactctacattctagagcttcgttattaactgagtatagagatggcctgatttgtagattctatgtggatcagagattatgcagaagttgcagatatagagttgctttattgtcttggatcatcatgccagtttaatttaaggtctttcaggacagaaacaacatctgcccattttgtttgacattctcttttcccctttatttcaaacaatacacgtgccctttgtagtaaaattagtcaatgagaaaaaaaataaatagcaccacctcttctagcacctaagatatatgctggaacactggttaaactcttaaagatatttaaagacatcttaaagatgtttttataacatgcacacacacccttcttttctcaatttgaatatagcattgattacaaagttacaaggtataccactgttttattagtagggtttgttgttgtttgtttctcttgtttgtttctgctttagtgtgtgtttgtggagagccagaaatgctatcgcattaaaagcctgtatcaattgtaaaacacatctccatttcagatacattaaaatgtgaagaaggaaaaacaaagcctctgagaggaaatactctgtttcaaaaaatgagatcacactgctttagaacttactgttttgtaacctgcttttatcacttaacattttgtaccattcaatatttttccacaacagcctctttaatactgtatagacagtgttccagcgaatggcgattccagaacttatttaaccaattctttgattatcagttgtttctgcttataaaaatccttgctagttcctggtatggtgtgaatgcattcactaatcatatatgtatttgttcagtgggttggttattgacagagcctttacggacttgggcactgtctatggtactgcgccttgggggacgcacagttaagttaaaagtatgttaaaaggtatgaagagctgaaaacagaggattgcttgttaatattaatcacctgttgattgcagttcacaagtttggtaattattttttcttcaagtattctgtcccctttaccaaatcgaaggctgggacatccgccttttcacagtgattcttctttccgccttggtgcactggaggcctaagtgtcatctgtttttttccaagttagttgacgcattcgttgaatggttccttttcgtaggaacttgtgctggaaattgcctctggcagtcaaaggaaacatttttgttttggagagagaaattttcgttttttattccaaagttcagcatttctgtgtttcctatgagtgcagtgctttacagcaaaatgcctcaggaatacaaagatgacttcttttaccccagtgaattctgattcagaaattcgtttctgttgacctggcaagttcattcagcacccatactggtcaccgtgtatctcagttagggggctgagaaaatggcccagcagactctgattactgtgatgaaggtgttcattatattatcccttatctttcttgactgtgatgtatactgagcttgcctctcttgtctgtgtcaccaggagatagttcagagccctgaatgttctctgttgtctcgaatattccagccgccatgtttttcttgcatacccagcccacttcttctttgacactctgacatagtcacatctttaatgttgcttaaagatgtttttgaacatttggaaagggctagtttcccagcatctttaagtcagaggtacccacttatccagatactcttcaggcagaggaatgatgatggaccctcatgaacatctcaaacttctcgttgattagagggaaactggatggatcgaaagttaatgaatgggagctcatttgtgacttacatcttccccctctagcttaaccattcatggcctccccactcactgcagactttgtctggcagagggagtaatacgctattttccgcttgagcacccagaagctgttgatgtaaattgatcagtacttttttgtgttttcctgaaattctgtttacatgcacatttcctctttgtctgtaaagtgatttgtatcataaagccacatccattttttcccactgtaataatgacacaaaactcattgaatatttgtgtttaaagattcttggaaaacataatggtgtgactatataaggcgtatataatttttttaaacaaaacctggtgagtattaataaaaacaatgatgttgtctttatgattgtgttttaaacatagtaattggtcaagtggatgttgcttagtgccagaggatcagagcaaaacatactagatgtgaaatagcccttctcttcttcattttacattttgagtggtgtttcacttacctttagaaaattttccaaaccttcagacaaatacttgatcaaatgatgcgggtttgaaagacataagcaaattagtttctgtgcaaacttgtgtccccattcagagaagaacaaattgaaaaattgatattcaataccaacaagataatttcgggaagcaatagagcattgttttgaccactaaggaacatgaagcttttaggagaagtagagagagctttgcccattgtcttccatttattatccgaagacattccaggtgaaaaaaaacatgggaaggaaaggtaggaagagaaagctttgaaaatgatttggagacatgcaatgctatttcaagtggttctggggactggatagaatacatcattgctttctttgcattcctatgtcatcttctcctgatgttatcattcgaagtcagactgtcaaatcctgtgtattgggaaacactctttgttcccttgacttggggactcctgcatttcttttgaagttttttttttttttttttaaatcattacattgttcaccctactccaatgtcttgttagtggttgggtggtatggctaagatggctgatgaactgaaataagggcagactgtacagctgtgtgtgtgtgtgtgtgtgtgtgtgtgtgtgggtgtgtgtgtgtgttgagagagagagagattgagacagagggtaagagaatttttctgcttacatttaaataactcacttatggataacatttggataacgtgttctctttaatcacacagacttttgccccgtctcttaatacctgtagaacaaatattgtatctgtaaacatctattgtaaacatcagtgtaaacatcaaaggtaaacatcaattgtggaataacctttttactcttacagagtgatttgcaattctgttatttgcaaatctgtctatattttgttgatgatattagtaatttgttttaactagaatgttctttctttctttcttttttctttttcttttgagatggagacccactctgttgcccaggctggagtttcactctgtcgcccacgctggagtgcagtggcacgatctcagctcactgcaacctccgcctcccaggttcaaacgattctcctgcctcagcctacccaagtagctgagattacaggctgtcaccactgtgcctggttcatttttgtatttttagtagagactgggtttcactatattggccaggctggtctcgaactcctgacctcaggtaatcgacctgcctcagcctcccacagtgctgggattacagtcatgagtcactgcggccagcttagaatgttcttccttaatagaactcatgacaaaatgaaaacatgcttaatttttatctgtgatgtggagttgtgtgtcctcttttccacttggttgtttcttttctcttactttgagttacattgtgagccctttcacacaaagaagggtctgagctttctctatacttggatgtcatgatacataccaggtgggagcttggaatgtgtttacagatgataatcatgttggtaaggtcttggttgatcactcgataagtagcaatttgttttttaattcatttccttgttaagaaaatatggagctgggcatggtggctcacgcctgtaatcccagcacttcgggagaccgatcatgaggtcaggagatcgagaccatcctggctaacacggtgaaacaccttctgtactaaaaatacaaaaaaattagccaggcgtggtggcgggtgtctgtaatcccagctacttgggaggctgaggcaggagaatggcatgaacccaggaggcggagcttgcagtgagctgagatcgcaccactgcactccagcctgggcaacagagtgagactctgtctcaaaaaaaaaaaaaaaaagaaaagaaaagaaaaaataaaacatggagagcatctaatgcatgagatattgtgtgtgctaagttctgacgacccaggagacatgatatgatcccaatcttcatataacttacatgtagtgaaggagacagataaaacacaacacaataacaaaactggtaaccatcgagcaaaagtagtcgataaaagtgttattgctaaaactcatggttgcagagctaagtggagactcaaaggggatatgtaggctgagatatctgagaagtccaaagatgacaggcagtcagaaccaggtggatgcagatcatctcaccatgtcatggaaactctgactcaatttctcggacctatttttctccgtgtcccccagcaggatgtctgaggcaaccactagtagcttctggctgacatgccactgttaacagcagccctggtgggtggaccacactcatccaagaagtagtaggctctaggaaaagttttgaggccaattttcttgcacctggattgaattccttacctacccctgaacccatccctgatactcaacatccaaccctgtgtaaaatatttgctgtttggatctaggagtggacttagccccagtaaaacggggactgagttgagcaggttggctcatgcctgtaatcccagcactttgggaggctgacgcaggtatatcacctgaggtcaggtgtttgagaccagcctggctaacatggtgaaaatctatctctagtaaaaatacaaaaattagttgggagtgatggctctcccctgtaatcccagctacgtagggggctgaggtaagagaatcacttgaacccgggaggcggaggttgcagttggccgagatcgtaccactgcactctagcttgggtgacagagcgagactccatctcaaaaaaaaaaaaaaaaaaaaaggactgagaatagggaagtggtggtttcccaggaaatattaaagagctgttaccagaaagcgaaatgaatcctggtttggtaaaaacaacagatgcctcctatacaaataaacacatgtgatcatttgcaaggagatctaggacaaaaacaaaaaatgtgcttgggaaatgcaaccgcgagagaggtattgtgaatggtgacttcgagcaagacttttccaagaaggtgtcttctcagctaggacctgagagttaggaaactgctatgaggtaggaggatgctagggaggtgtggtggttagaaggccattgtgtacgtggaaattccaggaggctaggctggctcagcctcagatgtgaggagtatggtcagagagagagagagttctgagacaggcaggaatcagagcctggtagattagagttgcttgcatcaaccccagtatcaaagatccccatctcccatgcaacaccctggcattaaagcagggaaagagagaagaaccctacagaggaggacagtaagagagtgagtggagttttcttttctgttttaattgagaagtgttagagaattgtggaatcatttctttctaggattttaagcacctctccatctgcctcaaataatcaaattccatccaattagatgctgttgccactcataatatgcaagtctacatatgtactaaacccagggcctctctgcatctggttttgatctatattttcaaagaaacctgctccccaaacttgcacaatgattccttcacagatgctgagtcagcagagagctagtgcatatttatccagagattctgatgaaaagagggagaaagaaaaatctaaaagcagaaaaatacgaagtatatggaaattttgaggtttcctgctgagttagggagaaggggttggggaatccttgaataaatcatagtgcctcacacaatggcctgctttgtctagtaaaagcacttttggttgaggatcagaaatacaaaacagtttaataatagtgagtgttgtgaggagtttcaagaatcttcgagggcatttgacttaaatgagctcagtgatggagtattcaagtaaagccagtgttgtcaatatgctaacttaaaaggctaatcaaacaggcaagtggtacaagtgaggaaaggaacacaattagttaatggaagatggagggtaatatggaagggacaaaaagttttttatttttatttatttatttagagacagagtctagctctgtcatccaagctagagtgcagtggcacgatcttggcccattacaacctccgccttcctggttcaagccattctcctctctcagccaccagagtagctgagattacaggtgtgcatcgccatgcctggctaatttttatatttttagtggagatggggtttcgccattttagccaggctggcctcaaactcctgacctcaagtgatccacctgcctaggcctcccaaagtgctgagattacaggcatgagctactgtgccaggtaggcaaaaactcttattctattcattcatttgtaaaattaagccaaagatagcatactttactttattgaaatgtaacacacacacatcagcacccttaaacatatacattcggttataatgtattggtaataacacaggaaattcattggtttcttatggggatataggacattagagtggttaaaatagtgatgatcttggctgggtggtggctcatgcctgtaatcctggcagttttggaaactgaggcaggaggatcatttgagctcaggagtttgagaccagcctgggcaacatagtgagaccctgtgtctatctttaaaataaataaataaataataattaaaatcgtggtctttctagtgaggcacagctatattcaaaatttggtccttatcctattttttgcagtaaccctcagtttcttcatctttaaaatgggactgttactagtgcctgaggttgtttttcaactgatattgagctggttgcttatagccattggtctttttgattgatggctgcctctttttggtgggtcagtgtccaaactctctcttgttaaatagttcacaaactatccttgcatagtatctttctcaaacagttatggtgaaagtttatattgcaaaaatagtacttagaatcagagatggcagatagtagctgtttactaaaagttagttgtaaccatcaatactgttgtcattacaaaaaaactgagtacaaacaatgtcttctgcatacgtgtggatgtagaatgagggagggtagatacagggcaggagagatcactctagctgcagtgggaaatggctcaaaaaccaaggaatttcgtaattcctggctggtgtaaactcattttgtaccagcttctcctcgtaggatctttcttgggtgttttatttaacccctctttaaaatggggctaataccagaaggggaatgggatgaaataatagaaccatatttagtgtctagctgagtggtttgcactggtatgtgagactttatattcttctcttctcctattacttataaaccaacaagtatctgagacaagtctcagtcaacttagaaaggttattttgctgaggttaaggttgcacccttgacacagcctcaggaggtcctgaggacacgtgcccaaggtggttggggtatagcttgcttttatacatttagggagacatgagacatcaatcaatacatgtaagatttgcattggttctacctggaagggagggacacttcaaggaggaaggtgtttccaggtcataggtagatttacacatattctgatgggcaagtggttcgtagagttaccgggagaaaagaatgtgtgggtttcaataaagggttatggagacctaggttttatcgtgcggttacagcctctaagtagcaggttttagggagaatagactgtaaatgtttcttatcagacttaaagtttgtgttgatggtaatggtggagaggggtataatgaggcatgttcacccctcagttctcatcatggtctgaaccagtctttcaggttaaactttagattgccctggtcgaggagggggtcctttcacatgatggggggtgagggtggtcaccttcaaattttatttttgatttacatactaaataaagctctctggtgaagggaacaaaaaaaaaagctttagagagggatgcagagaaaacaaaattgaagttgaaaggaatttcgaaatttgtgtgttaaaggaatgactattcagtgctgatatcagtgttgtgaaaaatggttagaataaaatgctcatgaaaatttctctttttaaaaagaaccctgactctttctgaaaataaaagtcatatttggacattatgaaaaaatttgctatatgaagtagaatctgactccccccagcctatcactcatcactcaacatttttgacgtatttcctcctcttttaaaatatcagtatatttgaattttcatagatacccattttcctccaaaacagaatcatactataaacatattttcatacaaattatctcataaacattttctagtgttactgatggtttgggaaaacatgggtttttaaaggttgttttttttttttttttttttagcatatggctatactgtagcttatttacccatttgcctactgttggatgtcaggtttttcttgacatagcctgtgataaatattaatgaaatgaacaataacaactttaaaaatgtacaaaatggacaagggagagtgaacagaggactcagagggggaaaaaagatccaatggccgtaaatataggacactgtgttcaccctctccaatgtcagatgaatgcaaactaaaaatgtgttgtcaaattgagaaatgttttgcaaagggcaatactatactgaatgcttgtgaagttaaactgctaaacatttttagaggttgctttgcaagtacaagggattttttttaagtgaaagtgattgtactttatagcctcatcaaggattattttttgaggaaacactcagagatatagtgaaaaaatgttgcatacaaggatatatggtacaaagttacctatatacactaaaacatctctcaagttttcattcaaagaataaaagctagtattctcatgctatggtacttttaaggcactaaacgatgcctgccgttggttgctgagtattaatttagtcagagctatgcatgcaggcagagctggcctatgcaggccccatttttgtgactaggaatttattctgcaccagcgtggcatagagagaaaccgagtgagtgcagtgccagctcgccgctagcttggatgaatacatgacacaccattgcgcttggagaaaatgctattcattgaaaataaaagggaatttaggaagaaatgtaatactcatcagtaattgcaaggaaactcttggatttcgttccagagtcttggtaatagtggttacataatatagcagtgaatgtatgcgtgagattagagaattttagaaggaagaaactgagattcagaaagagaccggctgtaccaaagtgtatccaaccaaaagcattcacagagagggggcagatcacatattgaacagtggtgcttttggaaaagatcatatgacagctataaagactctgatgaaaggttactagcaggttattcaaaggtactttttttgaaggcaagattttaaggcatgttagggtaggcattcaagtagggtgattttttaaaaatgtatttgcttgccgcagaagacaagtacaggttctgctctgatgcctgtcctggtcctctttcccttttaatgttagaatgtggcaaatgctcagtaatcactgagctagggatttccaaggctcttgtctttgtctgcatcccaggtccagggattgtacagttggtaaactgtaccaaagcatggagaccaggtgtttacgaggattgaagcatagttggtgctcctttcaccaagccttgtaccacaagcctagtgctgtatccatccagagacaagggtgccgttttccttactccaaatttacataagctaccagtgtttgcacccatgctgggctggccccacccagaggagggtgctttttctaactcacaaccaaacatacaggcagaaatggtcctgcctgtgcctacttctctgttagaaaagaaacactcctcttactcacactcatcggattccagttaagccactgtttgcaggggcattccctgaggaaattcgggctggagaagagagatgaaaatatctttctcaattctacctttgtataggaactccattctttgtctatccatagactattggattcccttagcctatatgtgaagaaggatctgatacagagcctaagtcttactgagagccttagaattgtctttagtgaagtgttaaatagtcgctttcaagcattcacttttgtagatgtcttcgcaggatttaaagaaagaataaaacatgccaggatatttatgaatcatgagatttaatagagaccaaagtagatcttattactgatgtgcttactgcttcattaaattccctttaaggtttgcggcttggatatggatcatttgcaataataattaggcagtgatcgattgattgggtctgacattgcacttgtcaccttgaaatgcaaaatccatctattttcaacagtgaacatttctcgctaatcttgcacaccagcatgtgatagtttattttatggagaaagtacaatttataaagtttggagacttaacattaaccttttactaagaatgaagtatcacttgtcattttacaaagaaatgaaaatcatccaaccagcaatttttttgagattagaaaacacagcctaatttcaaaagaatttttcaaatccaaaacgcatgcacttcaattgagtgctacaagtatattgtgagtattggagtttactaaaccttcacatggagtataaatgataaaattgtgagcttgagactagctctgctgtgtgtacagacacacacacacacatttagacacacacacgtctatttgtctatctatttccacatttaattccctaattctatctttgcctcaaaaaaaaaaaatgcaacactctgtttctgaaaagtgtgggtgctttccaagctgtcggaccaaagtattactgaaagttattccatttgaggatttgcacatttctttccaagttgtgatttttaaagaggggataaaaaaccaatgacctcattcttttgcatttgtatcaactttgatttccagaactttaactgttttgagtttatgacgtgtccagtctcaagtcagtatagcaatgagtaatcattgtagaattgcctattaaggggcaggcatcgttcctgatgctggaataaaatagcaaatgaagctggcctggcccatttctacacagaacctacatactagctaggaagcagaaggccaccttcagtcctgctgaatttagaaatacagtatatgaattggtatgaaaagacgttcacaatgtattggtatgttaagagatgatcagtgacaaaagctgtgtatcaaatgtatagatagattgataatctacacaccaagatgctaaaagtgattagtttgaatgatttctcttcttcacctctctgcagtttatagttttttgttaagtacatgtcttgtttacataataaaaatgacttaaagaaacgtaaataataacgaatatgcctcatacaggacaaactaagcaacaagtctggtggtatcagaatttgtacagaaaaacctctaaggtacccagcaatatgtcagaaattaccagactcgtgacttcaagtgcctttaactcttagtcatgagaaagtactattacctagtgataccatttgcaaaagaacacacaaacagatgtttctgttgtttagctgagtctctctttcaaacatccatggacaattgaaatcttccaagtatccgttggtttacacaacttgctccctattattaacaacaagagtaaaatagaatttaaattttgttttgtgtttttccacatataaaatctaaaatagttcgttactaaaagcaatcctgcaatcccacagatgtcagaatagtaatttaagaaatatgtacctatctgtatctgtatggaaattaaggccaagataagtaataacaaagtagcattgatttgttaaatgtctttgctagtgactgctgtctggaactactgaaaactgcagtattaacctctaaattgtatccctgagaccctcttcacactcacacccattcactggaattgaggatataagacagtcctgttagttgatgtaacttctcctaagggggaccagtgtagcttgaacatctacttaatcagtctggtacctcatccccatcaggacagtatgcccctctgattaaaacagactattgtcatcctgagatggagggaaattgattctaattcatggacaaggaaagagtaaaatttaaaaacataatctattcaagatcctgactttaaaagcaatggcttacctaagattacgcaaataatttatgataaaggtgggctgaaaatgttgggcttctatagtcaagtcaggacctcttgctgtgatattgctaactcctcagcctgggtatttacatcgggacaccagaaagacacatgttttcctgttggttacatattcatggtcagtggagttaaggacaattaaccaaggaactctaatgttcattttcttcaaccacttcatcctttcttgagtattgctctaccttttttgttgtgacttgcaaaaataaccaacacaaagaggctcagacaaaacacattcttcaagggagaactcactggtgtacaaaacagaaaagtccaagagatggatctcaggtacagccccaaccatattcagaaaatatactcagaaatctctgtgcttgtgtgtgtgtgcacgtgcttctgtgcttgtgtgtgtgtctttatgtttctcagctctgctttctttgattcagtcacagaaaagcccttcttggcacctacagatctccacttacattcttctagctgagccctttgagctgaaagagagcacctctgccactaaagcttggatgtttaagcaaaagtctcaggactgcctgtcattgcttcagcttaaagtataggcccatccattaaccagtcacattggcttggcagtagtctatggagattggccaggtctgggtcacatggcaacctatggaggccaatccttaatctttttctctggaaccatatggtctgattttttttttttttttttggcttcacctattttcttttttcttagttttttattttcataggtttcggggaacgggtggtgtttggttacatgaataagttcttcagtggtgatttgtgagattttggtacacccatcactcaagcagtatacactgcacccaatttgtagtcttttatcccttactgcacttccaccctttcccctgagtccacaaagtccattgtgtcattcttatgcctttgcttcctcatagcttagctcccacttacgagtgagaacatacaacgtttggttttgcattcctgagttagtctgcaatctcatccaggttgctgcgaatgccattgacccattcctttttatggctgagtcatattccatcatatctatctgtctatctctctatatatatctatctatatatggagatatataggtagatatatagattcagtcacagagatatatatctatatatctatgtagatgtatatagagatagatagatagagatatcacaggttctttatccactcatttgattgatgggcatttgcgttggaggaaccatctgatctgagaatggaggaggtattgtttcactcaggagaggtatacgtagacaatagatgctaaggaaggaaagcaattgttctttgtccagtctttgtctgtgctaatgacaactctatgaaactactcagtccaggaggatttcttacagcacaactctctggtgttcatgggactgacagttctggaatatttaaaactattcagtacccccacctcctgtcttgaattcctccttgtcctttgaaactcctttaccgtgaatctatagcagcatcatgacctgtgaagacacagtgcactttgagttcatttttcctgtgggctcttttttgttttcgtgtgtcaggttcataatgactgtgtgtgcatgaatgtgtgcatgagcatgtgtgtaaacacatacgtgagtttccatctctagaaattactgtcattcatcctggtcagagaatgtacagctttgtttaattaaatggtgaagctagttgagaattggcaaatggagtcagattgaaaaatattttacagctctttattcttcattttgtatttcttgtgttaaacagagaaagaaaaaaacacccttgggattgtaagtgatgaacttaagtctttgggattcctttataattcagtaggtcattaattctgcactacttgttgccttttggcttaaacatttgtgttttctatgtgcttagggacttctttttaatcttttagatatctgtctatctcaaggtcctggcataataataataattttatttcttgtgtaatgatttgatttaattcaaacattgtggaaatcctacgatgtgtgagctccatgctaggtgcttgagatatgaattcatgacacataatccctgccaccaagaagcacaaaatttttaaggagaattagagagtgacgtgaccagatgccctaaaaggtgtctgctggacagcattaaacagatacacaagcaaacaaaatagtatattaattaattcatgaaacaagtatttatcatgcaccagacactattcttggcagtgggcatgcaacaaggaggacatggacacgtccctaatcctacgaagcttgcattcccatgtaagccacacagttaaaacacacacacacacacacacacactaaatgaacaaatgcataattgcagcctgtggtaagtgctatgatgtcaggaaatacttctataaggaactgatatttaagcctgtttcgaaagttgggaggaccaactatgcaaagagtcagaatgcaagaacattgtatccagggagaacagaaagtgcaaagccatcgaggctgagagagattgctgggttcaaagactgagtggctggtgggtattaaacctgtgggagatcagcacactgtgagctggagagcaatgtggaaacctttattcagggatgtaaatgccttctggggcagacagacagtagatattctcatctaatgcagcatattctggggtattattagctcaaactggaagggggccactctagggtggaggctggacctcaccttaggattcctcgattcttgtacaacactcctctccttactcaggaggctttattttcttaaacacagctttattgaggaaggattaactgtacatatgtaaagtgtacattttgataacttgacttctgtgcatacctgacaaacttgactgtaatcaaggtagtgaacatctgtcaccccagaagcttcttcctacgtcgctgacatccttctttccgctcctccccttccaccctccccaaaacaaccaccaatccactttctatttctacacactagtttgccttttctagaattttatataaatggaatcatagaggaggtggagttactttttatagcttttaagcccacacagaataaaagtattctaatcttttttccatatgtctttttgtgtctgaaaaggatcttaaacatctctaacaataacctccttgttttctctacccgtggtctaaaacctgtgtttgcttgatgctaaacggtggagggatttttctgacttgaaaaaggcagagtttacctctccttttcttatctccattattattttgaaaaatgcaattgacctaggaaagaaaaagggggatgacagtgacataagattgggggggagagggtagagaggtgaaaggatgaatcaagcaaagatgctgcttcatcgttctgatcccagaaattagatgtgtggatgaccaattttcagctaattagcataaaacaaaatacatttcaggaaaattgtgctcgacacaatttaatctctgatggttcagaacagtctctgggtcatcatgagcatcagctctggaatcagaagcactggggagaaggattaatggggaactggtattcagggagctcaacatatatgctcacaatctccccattaacaaacaagaacttctttctattttatttcagtacagcttgtcctttgtttgcttcctgaataatttgaaaacatgtacaagttgaagtgtaatgcaatataagactttcagatattaaacattacatagtttaggtatacaattgattcatccattcattgatctggtaaacatttattaaacatgtactgtctccaggatatgtttctaggtactgagtatatggtggtgcagaaggtgattctgtatgtgcctgtaattgtttgtgtttgcgtatggttcagtgggatttgttagagatatgattaattgcttgtaaaataggaaagtctaccctgagcataggagtttaaagcaatgcaacaattttgcaacatccaccacagttaaaagtgtccatactctttgatcctctgatagcactagtggaaatttatcttggagatacactcacccctgtgctcaaagatgcatgtattacgaggctcatgaaggcttgtttgttgtacctaaatccccgtcaaggatggactagtgaaacgagtcatgatatatatttatggttgaatactatgcatctgtgaaaagaaggaggttggtttgtctgtactgacattcaacaaactcagacatatggtcaaggaggagaaaagcatgaagcataacgttatgtgtggtaggtttgcatttgtcaatgggatggaaaagagggcagtatacgtgcagcataggaaaatacaagacactgctaacttctgaaaatttattgatgagcaggggagtgaggatggaaaaagagccacctctttgaattactttaaatatttccaaggtgaatgtactggattttcagttttggaaagctaatcttaaaagtggaaaaatagataaaacaagtataaaggataccagtagattttctaatgttaaccttgggacctcatatattattggatgcaaacgtctacaaaggttgctattctgtcccccttctcccttgaccatgccgtgaaacaaagagaaaatgaacaaatccctgcaaccaaaccctctcaccagatttgactactgccaatgagattattgagttaccaactgcctctcagaaccctaaggcaatttggagcccagaaggaaagtgaggcccccaggtggatgtatggaaggaaggtggtgcacctttgggcccttgtgatccaggtgagtgacagagtgactcacctaaaaagagagggaggtctctgcagttggaagctgcaaatgatgatggtagaattttgcacaacccagggatcacaagcccagttttaggggaaagggctctaagagtagagacatccatataggcgcagatagtcctcctttatttaaatacaccagcagctgcaaggagtaaagggtcttgaggtggaaaagaagaggggtcattccagatccaaaaaatcgagatgactcctttgagcaatttcattcactcgtttgctgaacaaacctgaattgacaccttcttggcacagccttgcactacgtgatgaggtgaggtgctaggaccaggtcactagcattcactgaacttttcatttcatgcaagggaaagagccccctatcaggtaatctcacagacaaatatacaattaaaaactgtgataggggttattaaggacactgcagagtaaaacaaacaagcctgattatcttacagggaggaggagttataattcacctgtttatttagaaacctgctaatactaatcactaagaatctctgtgtggtggctcaggcatgtattcccagcacattgggaggctttggaaggaggattgtttgaggccaggagtgtgagaccagcctgggcaacatagcgagaccccccgtgtctcaaaaaaaaaaaaaaaaagaaaaaatagccaggtgtggcaccaccctcgtgtagtcccagcttctcggggaggctgaggcagaaggatccccggaacctaggagtttcaggctgtggtgaactatgatcatgccactgcactccagcttgggtgacagagcaagatcctgactcttaaaaaaaagatcgttcccactttacagttgactacattgaggggttgaaagatgaatttgcttgcaaaacacagcaaatatgagtggagacaagacttcagccaattaacacagggctccggcttaaggagagcctgagcacagtagttgcatagttggttattttaacaataaaatctaagaacttcgagtacacagtggctaatagctaggagggatctctgggcacgaagattagtgtagttgctctggtgacatttggcatattaacatgagacatgaagaaacctaaaccatattcattcaccatagttaaatgaggcaggagtcaacaaaatacagcctggcattaatagcctaaaaacaagatttttgagtttttcttaaaattgtgcacgtaatattacaaagtggtcatgtcacaggagaaaattttagtgactaaaggctggaatgtctgtctatatttattctagtatataactggtaaagaatatgtgttccctcccatcccagggtcagctgtgatatagaattaagatttttaactttgggtagtaaaaggacaccagggcatccatgctctccctgaaattgtgtatcgtacagtatttctggaaagaagtcttcatttgtttgttgtttttttctcctagaagggcatggcacacacacacataaaggttaagaaaaaatactgtttttgaaaagccaaataactgtggttcactatgtcgagacatgtggccaatctcattttcctacagatgttgttggacataaattgatgatttcaagaagcaaaaagaatattctgcaatgctcagtattaaggagttcagtgtgatcagatgggcctttgtcaaactgaagtattttaattaacttacaccgtaaaagtgaaagtgtaaagctttgcttttcttcctagctaatcaatgaagattaatattctatgggaacccgactttgcagacggagctgagcggcactgttttccctaccattttttcctcatagtaaataaatcatttttattatactgtatgaatttacttagctcttttaatagcctttgtaagaataatgcttcctttgattatattacatttttaaatgagtgcagtgtggaatacagttctgctgttgggggaagggtggtgagaaaaggaaagagatactgattatatcagttttatcagcttatcctgtgtgttttaaaccagataaagcagtgtctgagtatcctgggagtcttaggagtaaattactaagtatttgctaggattgaaatggctcatacctgtgccttgtataaaactacttctggggaagatgaggttagtctgaaaggacctggtctttataaaattattctgattgttattttgtacttttttttttttatcttcaaggttctggccaatctatttgattttttttcccccaaaggagagaagtaaactttataattccagggctaacatccacttgtataaattgatcagttgaattgaaaagctgctgactggctgatttagcatgttcttcaagtggtctcattcacaattgataagctgacttgtcaccctgaattattggaggcttaacccttgaaggacagatacagtttggcctatacagattgtacttttcatgagacaggaaaagggaggaagggaggtaagtgtgtgtgtgagagagataaattaatttcattagaaacaaaaatatcctgtgatcttatgcgttagaccaagtgttgaaatattaaagttcctgatgagaaaattcagaatcatacaaactttgtttttctatgtcatccatcttgtacatagtcagcaaaccaattcatttttttgagatggggtctgtcttccaggctggagtgcagtggtgcaatctcggctcactgcaacctccaccttttgggttcaagtgatcctccagcctcagactccaaagtatctgggactacaggcacatgccaccacacctggctaattttttgtatttttttttttttttgtagagacgtggtttcgccatgttggccaggctgaactcctggcctcaagttgtccgcccgcctcagcctcccaaagatttgggattacaggcatgagccaccgtgcccagcctaacaaacattcttttaacatatattgtccatcaagtcagaacctttaatagctcctattcagaacctataatagctccacactgtttatggaaaataaataatggctgaggctgaaaatttaaggttatcttaaatgcagcctcaatatgtaaactctgtgtgtgtgtgtgggtgtgggtgtgtctctctgtctgtctgtccgcaaatgggtcaaagtgaaaagctcttgtgaccttgattcacaagactcaggtttgagcttcatttctgcagtttgttagttgtgtgcttactcatctgttctaggcctctgttttatgatttgggtaacaggaatattagtaatgacagcaataatggggatgactgggctataatgctacttacctaatttaactgatgttttctggaaagaatgaaatcagaaagcatatctgcaagtgctggcaccctctgtaaggcgctgccgaattggttggttgttcttacatgaattcaggggtgagtcagacccatcgaactggagtcagagaaagccttgcaacctggacagaatggaaaattaatttttcctattgcttcaggcacatgttgaaccacggtcaattcaagtttgagatctctgcagatatatacgtttttaatttgtcaactaaataaatacacagatacataaatacattgagctttctgaggagacctggagtctgcatattctgtggagttgatttgaatggagacccaagagtgtacctctgagtcattttgggtaagagtaatgctctatagttttttatctttttttggactttgaggacttatacaatataatgaaaaacactgtttttaagtctttccgcagtaaagattcttacaaagcaaaagataaaaagtttcccttctttctcatctacttgccatgttctcctcctgttgacaatatcctcccacttccctttcgatcttgttatgtatttggttgaatcagattccattgctgatatttgactacttagatgtattgtaacaggaatatattatgcaattatgcacccgcaccattggagccacatgatgaatgtatgcaaattattatgttagcatagagtgcaatactacacagtgtcttctgactcaatatccttccacccaagaaacacatcttggagattgttgcatgtcaacatgtggagatctattttgttctttgcaaggctgcataatgtcctatgttatagatgtgttctcttttttttgtatatttgctcccttattgatgatgggcattaaagttccctcccgtgctgatggacattaaagtggcctcccactaccaagttttcacagttactcacaatggcactctcgggtcatgcatctcagtgtgtgcatgggtgatttctttttataggatatattcctagaagtagaatacttgagctttaaaaaaaatcacttgtgccttttgcatcgtgagtgcttagtgaatttataattatttgatcaataatgaatgtgcaatgaattttatgagcaaagaactgtcacctcatatttggcaaaattttctctcacctcagacttgggctattttaagaaaaaagaaacctgaaacctcttgagtttttaactttcagttgtacttaagagatcagagttggtgttcagaggcagatcagtctttacgtggaggtgctaaggttgcaaattacaaaataattaggaaagtgattgtgtgtgcacatgagtgtacttgtgtacacattttggagattttatattcaaactgcaatgaaaaaaatatgaatacctgggtagctgccattttgctatggaggtccaaggtcacatatttaatagttctaaatttatacccctgggaaggaagtatatgctcactgtaccctttaataaaggcacagaaatgtaccgtgcagtctgcatgaaagcatgagtgagtgctattcattttaagaagcactcaagcactgtgaaaattagcagtggaacatggttccaaatgaaagtgacaccatgagcctaatgagaaattgaataccatctatttatctcctctagcccaagatctttctcttctgtcatttgaatgtttctgaaacgccttttcttcctgggctgagaagtgcctcatgccttcttcccctgcctctctggaaatgagagtccttgtgctgttttcctttctacgctcatgaagagtcctgctaggtgcatggaaactttgctttctgtttacatgtgcttctctgtcttgctaactcgttgtcctaagttttaggtgtgatagctgtagtggttttcatgaagccaaatcgtaaaggtctgagaaatacacactgtgtgttgcttggcttgtcttagagcaaaccaaaatttggaaaattgtctgggaagggtaagatcacttagctgtgaagcctctgcttttaggaactggagaagtgatttgagggtgaaaatagggtaagcgtatttactctttagctccttaaggaatgcttcttcaccttcttcaactcactgagtttgtgtttgaaaaatattccaaagcctttgcttaaaaataatgtattatataatatccttcgattaagtttccaacgtgtagattcttgttagcacttagtggtgcaacttttataaagaaacctggtatttttttaattaactgatgaaaatggatgtaagtaaggggtggacattcccatgtcaatgaatcttgatggtggcctccggtcactcatggaaaaatgtatttttgattacttgtgtgccagcaacgttgctaggctttggatgcatggaagcgaataagaaatatgaaagtcctacctacatagagcttatattctaatggaaaacagaaactaattcttttgccttagttacctattgctatgtaattaccacctcatagttgctgtggactgagagtccgaaagcatgtttgctgagtagttttggcaggtgttggcaggagctaaaatagtgtcaaggctctctttgagggggaccttcactgagctctctcacctggctgttagcaggctggaagtttgctgcccacagatttacctctggaaaggtgtcttgggacaaagtacatagctcctccagaataagcaattcaagagagaatgaaagaggggacacccaagacagagaatccagtcgcttttattgctgatttaggaggtgacattccatttctcatgctgcattcttttcatccctataattaattaatctagcctgccccgaaggggagggagttacacatgaacagggatcactggggaccatgttacaggctttataccacatttattaaatgcctacgctggggagcactgagaaaagcataaaatagcagtgatgcgtataataggcaatgacacttattgggggcttcatattgtatcagctgtgtaccaagggtaaggataatgaaagctcacatatatggagtaaccattgtgccaggcactgtactaagtggccatgtgccctttctcatttggttttcataacagccctttctcagtgggtaccgatcagtacccattttacagataaggaaactgaggcacagacaacaatggcttctgaaattctcttctccgtgtcatgcactgcatttttctcccgttcaccagttgcatcttaggtctcagttcattttcaccaccttcctgaatatatagagagaaagcccatgcagtaaaccaatcaaatcctggctatccgagctgctctatctgcctctgaaagcctaggagtaaaggaaaattgtcctcatgagcagttcatgaggtgtcattcaaagcacttttgaggcaaagtattatgtttcacagccatggttcccagtagggacagcaatattgcagtgaaatgcaccaacatctctgcccatcccaaactctcctctcaaaccagtttattgaaatgaggcctcacttcacaagtaaataagtagtcaagctctggatttgtctctgctccagcttactgtatatttccactaaatgagtccattaaagcttaaactaaaccttttggaaaagaaaaacaaagcccacagcagctgtccagggctgcgggagttagaaaatgcaattcatgtgacttggtggaatgccagtgaagctaccattagattattctgtttactgttaaggtacgtggagacagacaggctctggagatgtccgacctgcatttggatgacaggtattgaccacctccttgatgccaggcatggtgctatgcagaggcatataacagcacacacaggacacagaccatcccctcaagggttttgcagtctcgtgggagtcatcaacacaagatttaaataatgtgtcatgtgtgctagggagaggaagtttggggttctttgggaggatataaccttgagaagaatcaggtagggaaagtccatagagaagggtttgtttcctctgagatacgtaggccaagaaagagttagggaagtgaagacaagaggggacagttttgtcaaacatcagctataaatactcaaaagcagctaaaataatgatatatctgcaaaactggaagcagttcagtagggttgaagaaaagatagtaaagtgagggctggaatgggagggcagagaggtggcaggttggaagactagctaagcattttgggctttgtaacaagggcattgacacatgttaaactcgggaaaaactgatcgtttcattgtacgaacagcctagcttataaagttatttaattagaaaattttcagaatacttttgattcggtggtaatgtgtcaacaaccctaaaatgttatgtgtttttctgtaaagtatgtggatgtgaagggaagcaacatggggcatgattattaagagtacagcttctggaatcagagatcatgtaagttggaattctagcttatccaattacttaatgtgtgagtttaggaaaatatctattaacttaccaccaattacttaatgtgtgagtttaggaaaatctattaacttaccacaatctatagtacctcatctgaaaaatgggaataattaattaatactgagctcatagagcttttggaagaatcaggttaggtttttacgctgcatagcacattaccacctgcagaagcttaacacaacactcttttgttatctaacagtttctgtgtatcagaaatttgagcatggcttagctgggttctctgcttaaaatctaatagactgcagtcagggtatcagccaggactgggttctcattagagactcatctcgaacaggatctgctttcaagctccctcaggttgctggcaggattcattttgttgtagctgcaggattcgtggctgcttgcttctgcacatccagaaatgggtggagagagagacagagacagagagggagagagatccagcaagagagttgctataatcttatgcaatcacttaggttgatttcctctctttgcaattgtgaattgtgctgcattaagcatgcacatgcaggtgtgtttttttatacagtgacttgtattcctttgggtagataaccagtagtgggattaactggatcaaatggtagatctatttttagctctttgagaaatctgcatactgttgcatactgtttgccatagaggttgtgctaatttacattcccaccagcagcatataagagtccccatttcaccacatccatgctaacatctattgttgtttcactttttaacagtggtcattctggctgggtaaggtggtagctcattatggttttaatttgcatttccctgatgattagtgataagcatttttttcatgtttcttggccatttgttggctattctcatcttctgagaaatgcctgttcaagtcagagactcagaaggagggaggcaaggaggagggtaaaggatggaaaattacctatcgggtacaaggtatgcaattcagttgacaggtacactcaaagccaagccttccccactatacaattcatccatgtaagcaaaagccacctgtgcccccaaagctactgaaattaaaataaaccttatataatcacatacatgtaatcacacttatcttatcacctctgtcatattccattggttagaaacaagttgtgggtcctgctcacattcaaggagggattagtaaaggcgtgaatgttaggatgtggggatcatggtgagaagaatcctcaaggatgcacaccacaagaatttggtaaaattgtacacataaggacagaatagaagcatttagccttgtgaagaattaccagggcaccgaaagagagaatggaagcatataccaaatagagcacatagagaacttgctcagatctcttaactgttgttgttctggttatgatatgatttttaggaacatgtggcagagtgtttctgtgagtttggtagcaaatacatattggatgtacttgcttagtcagttctgtgtgccagaggacactcatggggagagatcaaggttactttttgcaggtggggcattttgtaactgaataaaacccagtcagtaaaagtaagcaacatgcggaatctaggcaagtgttgcaatgtatgtgtgctcttgatctgaggaagaccatgcatttgactcagactagaaacctacaccacagaaatcccacccacaagcaatgctctattactgtaggtacaaggcagtaatttttttgtgtccattcacatatgcatgtgtgtttgtgtgtacataattgaccaactatcctcaggtttccctatggtgaatgatttattgagtcatcagacttgtggaacacctactctgtggtggccatgatgccagcctctagagataaaaagtacaataaacgagctatcttaaggaaactcaaattactttggcagacagaactagtaaactgaccactgacaattcaaaaatccatggggggagttccatttcgagttagatgggatatatttagggcaattcccatcctgtttcacttagatatgtttcactacatatcaaagtaaacttcagaggaaaaacaacaacaaaaaaccacccagacatacaggaggacattatataaggataagagggccaagtcaccaaaaagacaaaacaatcttaaacaatcatgattatttatgcacaaactatgggacttttaaaataaagccaaaactgatagaactgaaaagagaaatggagagtctacaaacataagtgaagtctgtctcactatttgataaaattaatattgagaaaattaacgaggctgtagaagtactgaacaacaccatcagccaacaaaacatagttaaaatgtgtaatcaacaccatccaacagcagcaggatgtccgttctgttcaagtccacatgagatatttaccaagataaaccatattctgtattataaaaaacttaacaaatttaaaataattgaaatcatatagttgctttcctctgacaaaattgagttaagctggaaatcagtaacataaaataaactggaaaaaatctaaaagcacttggaaattaaaccgcaaagtctaaatcacccatagttcaaagaggaagtctcaaggggaattatagaacttaaatgaaaatacattttacaaaatatatggtgggaagcgaaagcagtgcttagagggaaatacataatgctaagtgcttctattagagaataagaacgttctcaaatcaacaatgtaagtgcatatcataagagactattaaaaaaagcaaatcaaaaactaatacatgcaaagagaaagaagggaatagtaaatgtaagattaaaaaaatgaatttgaaaatcaaaaagcaatcaaacctaaatctggctctttcaaagcatagaagtgatgaatctattctagcaagactgacaaaaagcagagatgacaaaaattacaaacatcacataaattaaaaagattataaggaaataatcaaataatctatgcacatgtagtcaacaacttacatgaaatagactaattccttgacaaccattaccaaaacttattcaaaacaaacaggataagctaaatggttcaatagacttatttaaaatatcctgccaaaataaaaattttcagacacaaatggtttcattggctattccaccaaacatttaatgttgggaaaaaaaaaaaaaaactatacacagtctcttacagaaaatagaagtggaagatatacttctcaactcaatttatgagtctaacattaatctgatacgaaaaccaggctatatgtaatattttatatatgtatatatacacacacacacacacacacacacacacatacgtaaacatatatcatggaatacatataatacagaaaaataataacatagcatgaccacatagtattagtcccaggagtccaaggctggtttcatattgaaaaaaatcaatgttatgtaccatattaacacaataaagaagaaaactaacacatgaccctgtaaaatagtcctgaacagtattggaaaacaaaagctaatctacattgatgataaaaactctcaactaactagaaatagaaggcaccttctgcaacctggtagaggatgtcaacaaacaaccccacagctaatatcatacttattggtgaaaaagtgactgctatctccattagagcaggaacaagggaggagctccactctcaccaaacttatgccacatagtactggaaatcttactcactacaataaggaagaaaaagaattatagagcatatcggttggaaattaatatataagggcatctttaatcacagataatagaattgtctatttataaaatcccaaggaactctaaaacctcttaggtgaaaacataaatatcaatcatatatctatatactaggaaagaacatttggaagtcaaaacttaaaaacaaaccatttacaatagctccaaaaaatgcaatacttagctataaatataacaaacatataagagatctttatgctgaaaactataaagtatttgtgaaattaaaaaagcaaatctaaatatatacatagattcaaagactcattgtagtaaaagtattaattctgtacaaattggtgtataagtttaacacaatacaaatcaaaattctagcaggtatttttgtagctataaacgtgaagattctaaaaattataaggaaaaacaaaaactagaatatccaaaataaagaagaataaaattaggtgaatatatctaatttattttatataagcctatagaagtaaagatagtgcaaaccagtaaaggagaagacacattaatcaactggacaaaatagagactccagaaatagacccacaaaatatacttaattaaatcttagaaaaggtacaaaatcaaaggagaaatgattttgttttcaacaactggtgttggaataattgcaaacacatttgccaaatcatatgctttacaaaaaaattaactcaaaatggatcatagatctaaatataaaacgtagaactgtaaagttttagaagaacacatgggtaaaatattcacgtccaaaggagttaaaataagaatttttggccatgacaccaaatgcacaatctcacctccccaaaaaggtttaatttgacttaacaaaattgttaataaattatatgtgaaggtctctattaaaagaaagaaaatacaagaatctgtaaagaaatatttgtaaaccactcttgacaaatgttcagtatctagaatatattttgaactctcaaaacataaaagtaagaaagcaaacaaactatcttaataatgggaaaaagacttgaatagtcacttcacttagagtatattcatactcctttcttattgggtcctgagtggggggaaaagaagagaagaggatattcatcaggcaaaaacctaaaaaagaaacaaaaaaccgtgaaaaggtatttaacatcattagctattcagcaagtgcaaatgaaaactaggatggaataccattaaacacctagtagaggcataagataaaaaaaattgacaagacttagtgctgtggaggattcagagaaactggatttctcctgtactgctggtaggaacatagaacaatgcagacattcttaaaacattttgacagtccgttacaaagttaagtatatgcttatcatagagcctagcaatcctactcctgggttccttacccaaagatattgtatatttataaaaaacatgtacatgtctgtgtatagcaactctaccatagccccctagaaacaagccatatgtcttcaaatagatgaatttgaagcattacatgtacacgtggaatactactgaacaataaaaaggagcaactattgatatatgtgacaacttggatctatttcaaaagcattatgctaagagaaggaagccagtctcaaacgatgacatagtgtataaatccattcctatgacatctgcaagaaagaaagctgtaggtttggggagaaaagatcaggggctgccagggattaggggttggggggagggtagttgcaaatgaatagcacaagagagtttttggggtgatggaactcttctgcttcctaattgcacagccgttataagaatctgtaaattatgttaacatttatgaaattgtacatccaaactttcaaatttatggtatattaattccaaataaatgcaagcccatagattatatgaggataaagtctctgcatatttttgttgttatatctccagcccatagcatcattcctggcaaacattacacatttaaaaatatttgtggatggaataaatgaaaaagtgtagaattaccattgttattattatttatttattattttttgagacagcggcttcctctcttgcccaggctggagtacagtggtgccaatacagctcactgtaaccttgacctcctgggctcaggtgatcctcctgccttagcttcctgagtagctgagactacaggtgcacctcaacataattggctaattcttttaattttagtagagatggggttttgacatattgtccaggttggtctcaaattcctggcctcaagcaatcctcctgcctcaacttctcagagtgctgggactggaggagtgagccaccccacctggcaaaaattatcttttaaaagccatatgttaggagctagtttaggggaaatatggtgactacttggacatatatatttatattgtatgatgatactttacagctatagattactaataatttataaagtacattgttttatatttagaatttgcaatataagaagaagggttttgcacgagggtggggctgtggtcatttgatccagtttctgttttaagaacatgccacagtctgcagtggagaagagaaaggagagagggaaagtggaatctctaagttgtattaatgctacatcagtgactattcttctacataggtctttgtgcatatgatgtctatttaattctaaaaatggaattactaggtcaaaggttatgtatatttagaaatattacacatatattacatgaccctcccaaatgcccagtgttttatacttttaccaagtctcaggagagttttcaacgaacttgtacataaaataaaagctggtggcatggtggctcacatctgtaatgacagcacttcgggaggccaaggcaggaggactgcttgatctcaggagttgaagactagcctgggcaaaaatattttttaaaaaattgccaggtgtagtggtgtgtgcctttggttctagctactcaggagactgaggtgggaggatcccttgagttcaggaggttgaggctgcagtaagccaagatcacagcactgcacgctagcccaggtgacagaatgaaactctgtcataaataaatagataaagctgatacagtatctgtaatttgaaatatgtactgtacacttctgaaccaaccatcctccctcccttcctcgctccccctcccctcccctcccctcccctccttccttccctctctccctccctccctccctcccttccttccttccttccttcctgtaataagttgtgagttttctcataatgtcttcaccaatagggcaacacatgatagccctcatttcacattctacctaaaaacgtgaacctcacaatactcgaaaatctccccacatacacaaaaagactctatatcacatacggaaaaggtagctggctttagttcagtgatttttcaatgaggaatgctgcacttccaatgaaaacagacagccagtgtagagacagtccgtatcctgtttctactgtatgactctgattcataaattactaaagtgtattcctgacaaataaatatttcaccagccagtgacagcgttatgagctaattaaaatctgagccctggaagaagtggtgccattagctcaattcacaggactggaaagtatgtgtctgctcacggactgagaggtagacatttacatatgggaaggagggggccggcttattaagagcaacattgaggtttggatgaagagagcactctgtcaaagctgagatatttaaagaaaagccaaaatgacaatatgagaggtttcttttgcccttgggaagaaagaggtaacactgcatggtggtgttaagtgtaagggcttgggggacgggccacactgtcttgagttcagatcccagatctgccatttagcagagatagaactttggggttgtcgttcagcctttctaacctgcagcatcctcatttgtgcagtgggcatagaaatccacatagtggcaagggtataaaatcagatactacttttagatcctcagcagagtgccaggcaaatcaatagatggttgataccttgtcactagcgtcaactcttgtatccacaagaagtcatgtttaaacgtccagttttctgttaaaaatttcaaacctgtcggatgctaagcagttttctagtttgaagtttgttccttcagaaaatatggttaacacacattttttgataacttatgatgtgccaagtcatggatggttctaagcattttacggtcaacatctcatttcatcatcgcaataatatagaagatggatatcgttaactctacagaggaagctgaggaacagcagcaatgagttatttgctctaaaatttaacactttttttttttagacagatgcctaaactccctttgtttcacacaactatgcaaattgtgaggccaaggatatgactgcaaacgattaaggtttaatttacatgaatagccaggcgaagtgcctcacacctgtaatcccagcactttgggaggctgcggtgggtggattacctgaggtcaggagttcaagaccatcctggccaacatggcaaaactccatctctactaaaaatacaaaaattacctgtgcgtggtggcacacacccgtaatcccagctgctcgggaggctgaggcaggagaatcacttgaacctgggaggcggaggttgcagtgagctgagatcgcaccattgcactgcagcatgggcgacagagccggactccatctccccccaccaaaagaataaaaaataaaaaagtttacatgaatgagctttcttccccatgaaaataactgtgtcacttctcccttggtctaacccacacaaaatccccaccctgtctggcacagatacacttaacatgcaatattaagtacaatttccattttatttttctccagagtatcgtgtgtcttcagtcttgaaggactcagctccttacatgggctttggtgggggtcatggggcagcacccgcaggtctaaatcgaggtgggggtttttggtccctgtggggttcacaagatcaattcctgactactttactgtgaactgtgcagctcacacagtaacgtggcttcacatacagcttgggaagcacaaaggcatcgaagacgcttgcttcagaaacatccctgactgctgtggcctctactatgttttgaatacaaatttcttaatggccttgtctttgggcacgcgctgggcacagttcgtgcagcaaataggctgcatgtggctgcagccctttttggcatgactgttgttcttccttttcttagtcatcttggaggcaaggaccggagatcctaagttgttcttttaaatatatatgtatatatatataatattcgtctgggtacattggctcacgcctgtaatcccagcatttcgagaggctgaggcgggcagatcacctgaggttgggagtttgagatcagccaaagattttcttttagcctggccaatacggtgaaacctcatctctactaaacatacaaaaaaatgagctggatgtggtggcaggcacctgtaatcccagctacttgggaggctgaggcaggagaatagcttaaacccgggaggcagaggttgcagtgagccaagatcgcgccactacactgcagcctgggcgtgacagagcgagaatccgtctcaaaaaaaaaaaaaaaaaaattattgcagacctaagagaaaatctggttggtccttcctagaccccttttgtttaaacagctatgactgaggggagcacttcatgtggtcataaatggtggctggtgttctacccctgactgtgattataatttcagagaaagaaaagtctctgtgaactagccacaaatgcctccgaaagcataaaatcgttattcagcattctccatactttcctgtatccatggtgttgtcagcaatatgtaatattatccatagtacttatgatactgtgtttgcttggtctcaagagagaaggttaaaagtaacaatctcaggtctggttataagcattttgtaaataataacttatttgatacttattatcaccctatgcacttagccactattatccccatcttatatatactgttatgtcaaggtagggagaaataaatatgttaagaaataaatagagcagtttttgatgacagggatttacttacaggtcttttggtatatggtgtgtactgtatgtgtatgcacgagcgtgcatgtgtgtggggaatgtgtacattctgtatcatggtgtgaataagttgagagtgagagtcgggagtaagggagatgacaattgtgtggtgatgatttcaagttaagagtataaatgtggaatgaatgagtttctttcagaggactttgggttgtatatgcttcaaaacgagcttttatcttctgcattcttcctcatagccccgtggaggcaggctgaagccttggcacatcttggtaggatgacctgactgagagcaaaggtcgtttgcaagcatataaggactttattaagcagcatattaatcaggcactgttggttgcaagcaacagagtcacaatgcacctggtcttttgtttagaagagggagttcattggcttacacaactgcaaaggtccgaaagaggctgggttcagatgcacaaatacacggtttgaaatctggttctttgctgtttcttggctcagcttttcagtcttgacatcgtcctctggcaaattcttccttaatgggggctcaagtgatgcagcagctccaggcttactttctatgaaatggacagccctggtgaaaagcaaatgtctccttcctaaccattctgacaagaacaataaaatcctcaaagattttctttcaaagaataatagcatgtattaagtgccagacactaagtcctttttgtatatgaactctgttatttccttgaatcctcacaataattctgcaagataggtactatacttaaccccattttaatatggtaaaacttagttacagaacagttctgtcacttagctattgctgtgtaatgagctagtccaaagcctagtggcttgaaagagtgaccatgagtctgataaattggcaaaccaagagagcctgaatcctccagggtgacatcagcggggatagttcggttctgtacgtgtgtgtctctgatatccccagcaagctagcctggttcacttagtgaggtagagatacagcagtgagctggcacaattgtacatgcagaaggggcaaaggtactcaaagcctggagaggctcatgctaggaactgacacattctcatttctaccctattgttaccagaatatgttacaagtccagtttggattcagagggtggggaactaaactctaccacttgatgggaggatgttcatggtcatatcacaaagggctagaactggggaagaatcggaggctattttggtaatctgtctgacataatggtaacttttttttctttttactttttttttttttttttttttaagacggagtctcactttgtcgccaggctggagtgcagtggtgcaatctcggctcactgcaacctccgcctcctgggttcaagccattctcctgcctcaacctcccaagtagctgggactacaggtgcatgacaccacgcccagttaatttttgtatttttagtagagatgaggtttcaccatgttggccaggatggtcttgacaccttaacctcgtgatccgcccacctcagcctcccaaagtgctgggattacaggtgtgagccacggcacgcagtcataaaggtaattaaacttgcccaaagttagatttttagcaggattcaaaccaggaaagtctggctccagagtacaagttcttcctcattgcaatgttctttatatagtttttattgattcggcttggatagtaaccccacaattgaaccaatcattttggccaggaaaacaaagtgtttcatcggtttggttagatttgggtcctgtcttcatttctaagatgaggtacaggagtcagccctacctaaaccatgggtactggaagtggcataggaacagtagctcaaaggaaagttattttcagaagaagtaatggatagagatcaggtgacaaaataatatcccccactgatagggatatggtaggggcaattgggtaaatttcaaggataagaccttgccatgatactcttggattacaatggagagacacatttgccctatctcctggggaaaaaaattgaggaattacagttggctttaagtgtatgcatctgattgttgactagatcatgaggaggataatgtggacattaggaagaggggccttgcagaaaggggcagaaatagcaaatttcaagtgcctgggagcccccaaatcgggttgtgtgtgctatttttaaagtaccaggagacacgacaactcctagctgcaaagagacatttatcacactgaaaaaaaaaatgagtgaatggttagacagatagatggatgatggatgggtgggtgggtgggtgcatggatagatggtggatgaaaaaataagcaatgaatgaccctctagatgataagtggaaccctgctttgttttccatttcctgcttcaaatctcatttgccagcaataccaaataggatatatactcctctacttccatctatacctggcctctaatcttcttcatttttgaagattttttttttttttttttgagacagagcctagctctgtcgcccaggctggggtgcaatggcgagatcttggcccactgcaacctctgcctcctgggttcaagcaattctcctgcctcagccttccaagtagttggaattaacaggcacgtgccaccatgcccagctaatttttgtatttttggtagaggtggagtttcgccatatttggccaggctggtcttgaactcctgacctcaggtgatctacccacatcagcttcccaaagtgctgagattgtaggcatgaagccaccacgccaggcctgaagactgattatttttaagccagctgaatgggttaagtgtttgtccattgtgctctggaaattctctgagcgtattcacattattacacttaacacttttgtgaaccacatccttttaggcaaaagtgatcatctctgtctcactcattgcagtactctaatgcctaacacagagcctgacccagagagagtgcactgcaagtatattctgaatgatggagtgaaacagtgagtcagtgtgcaaataatgtgtgttgataagcatatgtagggtctgcagtggtgatgtaggttttatagccaatgacatctccagtgcctttttacttgataaatataagactataattttcttaaaagcataaataataggaagtgttctcgaagcccattcctggccaaattctttgcctttaatatcgtgcttaaattttgtcaacgcatttcttttaaaaaatggaggaaaactgagtggggaacaagaacactttctcatctcattcataatctatcaggcaatcctggggtgccatcaagaagagatgatgaggcgacagtgacacagcaatgactgccttcagttttatcatcagtcctggatagagaaggtgcaccacctataagtgaaggtgatcagtttttccatttccaaagagatgggtatcttaaaagttagaaatttgtgactttgaattgcctttttaatcataagaatcatagcttctggccgggcatggtggatcatgcctgtaatcccagcattttgggaagccaaggcgggcagatcacatgaggccaggagttcgaaacaagcctggtcaacatggtgaaaccacatctctactaaaaatacaaaaagttagccaggtgtggtatcgcacacctgtagtctcagctactctggaggctgaggcaggagaattgcttcgacctgggaagcggaggttgcagtgagccaagaccacaccattgcactgcagcgtgggcattgcagcgagactgtctttttttttttttttttttttttaaaaaaaaaaaaaaagaatcataggttctgcttagtcagtgcctacttatgttttaagttatagttggccactttacatctcttgcttctgctccggtaggtttcataatctccattttatagttgagggaatgagtacctgaaaggatggaataaactcaccataatcaacctagctggcaagtgattggaactgaggtttgaaccatgttcatttgactctgaacactgcagtctttcctgaataccatccctcaagcagagagttgggcccagatgagataggcagagcttccttagcataaagtcaatattgtctttttgccagacagtaagccaagcataaccgcatacatctgaccagaggctcttgtacaaattggccactcaggttctctgaaggagcttgatttggggcctgtgaatagtcctgtgaatattgggatacatgagattaatttttccctacatctaaacatccaaatggcttaacttccagaggggcacatcttagcttctagggggtgagaggcttcccagtatcttaaagaagtggttcttaatctcactggcaagttagaatcacctggagaactttaaaaaacattgatgactagagtcctttttttctttctttttttttttttttttgagtgtcattctgttacccagactagagcgaagtggcacaatatcaggtcactgcaacctctgccgcccgggctgaagcaattctcctgactcaggctggaattacaggcaccttccaccatgcccagctaatttttgtattgttaatggagatggggttttcccatgtcagccaggctggcctcaaactcctgacttcgactgatctgcctgtctcggcctcccaaagtgctgggattacagtcatgagataccctgtccggccagagtccaagttcatcattgcaatgttctttatctgtatatatttttaattgaactcctatgttcactgcagcattatttataatagctgagagatggaagcaacctaaaggtccattgatgggtgaaaggttgaagaaattgtgatacacagacacacacacacacacacacacacacacacacacacacacacacacacagtcactttatcttgaataacataagacaaatgtattcaggtataagtattaattcatggtgccttgcataatggtgagaggcacacatgtttatgaaggcagaagtaaactatttgtaaagctgaaaaaaaaaaaccacacacacacaatggaatagtattcagccctgaaaaataagggcagcctgacgcacacttcagcatggatattccttgaggaaattatgctaagcgaaatcaaccagtcacaagaagacaaatactgcatgatttcacttatatagctatttcaaatactgaaactcttagaaacagtgggcttatcaaaattgaaaaaaaaagatacatctttcagtaactgccataaagcaagagaatgctgccacgtggtgataaataggtcccctgacatatgtgcataaaaattgtgcccattttaacaggatacattttttcacttgtgattctgatgaaactgcaaactagagtcagaaaacaaaccgttataccaggaaataaaccagaaaataaataaataaccagaaaataaatcatgtgccttggtattttcttgcgtttcagaagtgaccttattatggcaaaactattttttgatattatggtttgtatgcatcaaaaatgcaggttttaataccaagatccatgacctagaaagaggttttagtatcagattctcaatgtttttgatgaagagggaaagagaaaacatatcatttaaaaaattattttcaatatatgacagaattttatattttgaacaagatattgttttgtatataagccatggagagtacacttgaaaagctttggcttttgagatatttggtttctggactcttgtttctgtaaattagaacattccgatgtgagatgaacatattggttgaagatcattgcaatggtcatgtttttccaaagagaagtagttgaaatcatttagtagcatgtgaataaaagcaaggtttttagaggcaattcagtaattttggtagcttttgttgcaaccaacagagaatcaatgacaagacaaggagaagagagagagcagctcttgtcttaatttaaagctgaaagatacacacatgattaataccaaagaaactttccattttattggtggaatgaaagtaaccttgtagagcttttctgtattggtagaaagcaaaagcaaaaaaattaattgtttatttaataagtggtatttttctgagttctgcttatagtttctttagacgtagaataacacatcattaagaaaaataataattgatctgccatgaaaaaaaaagaatgactgacacagcttctttgctgtcagcccttttgtactccaaaacgtaatgcccattttgaaatatcatggctaatccaaaaaatatacagctaaacagaaaaacaacatcagttccaaatatgaatacatgatctgctacttaatatgtcagggtatttgtcaggttgataacattaggctctgcggcattcaattctaagccttgcaatatttgaagtgtgatactgtgcttcagtaaatttaatacgtgggcctcagtaatggagggaatcacgttagcacttggcagtttgttatgctgtataaaattgactgccctgcaaatacaatagcgatcataaaaacggtggtcagcagagaggggtgtaatgcatttttgaggtttcagtaaaggtccagatgaaatttattgagatttttgccatttggatggtgatcaatagagctgtgctaataatttgttgtgaggatgttctctggggatatgacattttgctgtgaaactttggaaattcagaaagtagactaagtgatgatactgctccagtatatataaccgtcaaagactttaacatcgctctgggagaggatttatagtgatggtgattacttcttcaggcattgaggatgtgatgcatccaattattgatatgttttcatgcattttccagtttggactcacagtcatttgatcgtattgctgtttcagcccagagttttgtgataggtttgtttttaatttcattcacagtttccaaattgctagcctattttcttaattatatcattgatttcccctgcctcctctcccttcaccctgcccacatccagaaaatgatcgttgaagaaaagaattccgtcagctttcattcacatcaacagaggctacttagaaatcctgactgtgaaaactacttttgttgtgttgtagttgctgttgctgctgctgtagatggcttgtgtgctgtaccgaatttgcaaacaggcttctgagttaatgttaaaggagtacatagcatgcagataatgtttgtgatggttacagttttaatgcacatatgtcagtggacctgttaaatcactgtgaggcagcattctttggctttatggtggttgccgttgaatttatcttttttttttttcaattttgattagccgcgttccaagagagagagatgaattatccaatctttgcaaagtgggattccacactgacaatacagagatatcattctgagaaaaataaaataaaacaaaataaagaaggttttaaaacttcacatttggtaaaactgacttatcctgaggctgtttttatgtctgttctgtatgttagaaaaggaatttctgagttcgtgtttatttccctgttacattgttctgtttcctcagtgtatttcatgaacctgaccaattaagtttcagccctgtctaggaatttttttgttgttgctgttggattaaagcaactaagtaactctgcagtggacagaggcttagagagactccacattatttgtttgcaagaggaaatttgtcagcactttgcagaaagaacactgagactaggcacagcagaacaatttattttcaatgagcatgcacaaagtaagatttatgactttgcatcttcgatgacatttcttacattgttaccaagctacagcaaattaaagggatccgtgaatactaaggggtgtgtttttgtaatgaggaaaaagagacagagcaataagaagataattaaggtaacaacttgtgaaaaattaaagtgtttccatctttcatttttgaatctctgagcataaactttgtagttgttaatttaattgccgctgttcgcggcatccctgaagaatattgaggattaatcgtctggttcattccaacaagagataaggcctaagtgaattgaaattttaccaatttaaccctgtcttcctcctaatatgacatgattaacatttttcaattaaccacatgtaattattctgaaggcctcattccacttatttctagtctttttgactgcagattggccttttcaggtagtttggatctagaataattcaaagaaagctctgtttgttctattttgcatctggcacacaggttcatctgcattgtctttggagttgccatttcatcggaaaataaagatccataacagttgcattcatttttgcctaggtgctcttcctgtaaagcacagtgctgctcattgaagcctgaaggagtaatgtggtattgttggagcatatttgtaactgagcagagtgaaagactaaacaccttgcaggcaagaatgtcaaaggaagagattggctggaaatggttttccacagtaaatggaaagacctcaagattcgggagagtttggcatttccaaggaacagaataaaggctagttctttgtgttcgtccatatggtagccagtaatcacagtggatattgaaatgtaaattaattaaagtttaatgaaatcaacagttcagtttgtctcatattagccacatctcaagtgtccaatgacccccctgtgactagtagctgtcatattggagccaatacctagtagagatacagaacatctctatcatcttgggattttttttttttttttttttttgacagggtcttgttctgttatccaggctggagggcagtggtgcaatgatggtgcaatacagccttaaactcctgggctaaagtgattttctaacctcatccgctcgagtagctgggattacaggtgcacgccaccacacctagctaattaatttgtttgtttgtttgttgtgtagaggctgggtctcataatgttgcccaggctgatcttgaactcctggcctcaaacaatcctcctgccttggcctcccaaagtgttgggattacgggtgtgagtcacttcacctggccccatctagggaaaattatcggatagtgctaggccagagcacagtcatcaggtggatagtggttagtattaaccagggcattctaaattctgatatggcaacaaaaatctctgtaccagaggggttaatgctacatgggtttatttctctcatacacaaaatctactgcatgcctgggcaggaaggaggcatctagaagtttgcgctggggccctttcattcctcgtcatggcccatgggccaggactggatgcccatgccctgcctccctgcaacaggacttttatttcagtcttttgtttgccaactggacactaagttcctatttgtatcaccaaacactattattatttctattctataaaggagaaactgaggcccagagaagttagatagtctaaaataaatacctaaagaatgatgcagtgggtttctaggtacatctgagtccagctgcaaagtctaatctttactgagctagctggactcttctggtgcacactaggaagtcatcagaggctttccagctttagaaaacctattctgaccagcacaggtgatacggtttggctgtgtccccagccaaatgtcatcttgaactgtagctcctgtaattcccacatgttgtgggagggaactggtgggagataatcgaattgtgggggtagtttcccccatactgttctcgtggtagcgagtaagtctgatgagatctgatggttttataaggggaaaccccttcacttggttgtcattctctctcttgcccgctgccaatgtaaggagtacctttcaccttccgccatgattgtgaggcttccccagccacgtggaactgtgagtccattaaacctccttttctttatacattacccagtctcaggtatgtctttatcagcagcctgaaaacggactaatacaaaaggaaacttagaagggaacctcagattaggggcaagctccttggttagaagcctgatacgtgacaacagcaacttaactcaaaggaataatggtggtaaactcgaacacataacattatgcaacagtccctacctggtcctggagtagaaactccaaaaggggaaggttgtagttcatctgcaaatgtatgtgcacaggctcactacatgttttggctgatttttattgagcatctgtgatttgccagatattgttttaactttttagcttgatgtacattagctaattaaatactcaatatttcagtgagttagcctctattttcatggttttacagatgagaaaatgcacgtagagagaggttaggtaacttgcccgaggtgacacagcagaggagctggaattttagtcaccatcttaagaatgaagcaatgtttggagagaatggtgactcagagattcgtatcacagccaaatcatacagaaagcgctgttgactcaaatagggtaaacagataatgcaaatccaaagctttgggtgtgaggatcagatggggcaatgaggatggcgaaaggaatacctgaagtcatgagagatggtaagattgctgagagggtgcagatataaagggagaaaaataagaggccacacatgagatcttcagcaacatgactcattaaataagaccaagggtttcagtgttaaacggacttctgtaaatcttggctttggcactatgtcacatgggcaagtcatgtaactttctgggacaagatttccttattggcaacgtggaggcaaggatgctcaaagcaccagacccaaccaggacaaagaagagaatgagcatgcacatctctgcccacaaactcagtcttggaataagaagcacagttttgtgttattgtgaaacaacgttaattttatcctcatccccacttttccttcatggccaggaaatgtaaccccccattatgcaaaagataataattctcacctggggcctacaaaggtgaaggggatggggaggacctgcctaatcatctaccttcatcatctcccagatatataggctgcatttctgcaggccgtatgcttgagacttgaatatttcactaaaacaaggaacacacatccatttccctttggagagctctgctgctggataaactcagactttttttataagatggagtctggctctgctgcctagcctggagtgcaatggtgtgatttaggctcagtgcaagctccgcctcccgggttcaagtaattcttgtgcctcagcctcccaagtagctaagattacagcctcctaccacctagttaatttttatatttttagtagagacaggtttttaccattttgagcaggctggtctcaaactcctggccccaagtgatctgccttccttgccctcccaaagtgctgggattacaggcatgagccaccatgcatggtcaacttacagattttgatattcttaccagtgtctggacatctcttttataatgcagatgaaatcaatctctctctgtgtgtgtgtgtgtgtgtgtatgtgtgtgtgtttgtgtgtgtgtgtgtctgctcctcctctcttctctttctttttctattttcattatagctactctgtcactccccatgcagaacatccaacataatcacttcaacaaccagcttttggaaaagcaaaagcttcttacagacagaattgtctttctgccatgcttggcttcatccctccactaactctattccttttccttcttgagttcagagacaaagagggtcctatatacctacctgtttgagtgatggaagagaggaggaaaatcctaactaaatagccccagatagtttgcaaccaggtttttaaaatgcttaacatggttcctggcatattatctgtgctggatcaagggtaagggtaacttctactactactacttttatcagcaatggtgaggaaaggatcagagacctgagtccaccctcgacagtttcagtttttggtaaagaggcaagggagaggagaatgtttcaagaatgttgggttggtgaataaaaccaaaggccatgaagaggttgaagactgagaaatacattgattggattcttttttttttaagttcatcggtgagctttcagggggcagttttagttgctgtggacagaagacaagcattcatgtcttaaggaatgaggaattgaggaggaagctaagacccttaggatggggtgagcttgtaaaatgttggctgtggaggaggaagaaggtaaagacataagcctggaaggaagaactgacatgagttttagttgctgacttgatatccaagtcaagactgcagtggatcccaggacacctggaaaaagatagctgtctgggcattaggggattaggaatattagccaaagaatggtaggctctgtctaggtatttatggactgttctctctttctctctgcatgaaactaattcattctcattctcttattctctccttctctccctctctctctctctctctctctctctctctctctctccctccttctccctcccaatttgtccattttctgaatggacaaataaattttgtccatttttttttaaatggcttttttttttttttttttttttagttttttaaaggtcaccttctcttggttatttttctgaccacacaaagtttcttttccccactctgagtctgtatgataggattttcttcattttctgtgccacttcgctcagtttgcacttatgttttcatggctatattgtctaacttcccaaatatgtagttttgtaaggagagaaatgatttcttcaatttattgttggatacccaggacctagcatatagtatgagtttaataaatacatcttttaagtgcataaatgaatgcattgatgaatttgggggcatctttctatttttttaaaggaatgaataaaagaatgtggcatatttctaggcagagctcatcaatatctgaaccaacaattcctgtgtgaaacgctgaaagcagaacctctcagagtgatatcctgtgcaataattattggaactgggagtgagagacggagacttgaatgaggaaatatttatggggaaggtagcgttaaactttccaggatgtttccttggtatgctcataatggatttcaaagatccacacctcttggcggactccaggagcaggatttcatgaagctcttttgtgaaatgcttccattaggcgttggcatctttcccaaagggattcaagcatggtttctaagtgtctcagagcctaacgtggaattgggagagagaaggagggagtgaagaggaaccctcgttggaagtaataatgaagcctcctccagctttgcagagctctgccaggaagccaccctcagcaaaccagggaacctcctgacgatgagctggggtggtttctgaaccatgagtcatcttgtgcaaagtggctctggctttatcaggatgatgtgtctagacttgcagtcagctggggagcaagtaggaggatcctggggaggaggccgggaaataatgggtgagtgttagtgctggatccagatcgcttcctgcccttcaaggagttaagttcagggcatctattcacacccaatatttattcattattcacccacggaataccagacacagtgcttggttctgggaatctaatgctgaccaagacagataggaccccttctctgatggaccttaaaatacagcttgggcggcagctagaagaccttatcgcatgattgttaatccaagttctcaggtgtgctctaaggggaaaatgcgcagcagtcaatgagagcataaagcacggaaatggagttttgctagagtgcatcaaggatcattgttattttatttttatttttattttggaaggtggggccatttatggctccctgtaccagatgaaagattgcatgttcattaacatattaatgccatttgtagtttggatgagttaaactcatctaactttagtgtttacaagggatgagctactatagtcttttggatcccttcttctcctttacctcatcatcctatccaccagtaagttctaatccatctttcctactctgtccctgctgtcaccagcctggtcacggtccatcatattgacgaccgcaccagccttctgactggacaccatgctactgctcttgtttcttctcacctattctctgcacagcagccatagtgaccttggaaattcataaatctgtcatgtcagtccccttcccccttaagatgtttcagcgggatcctatttcttattttccttctccttcttctccatcttctccttcttcttcctccttcttcttccttcttccttctttcttctttttatctgagacagggtctcactctgttgcccaggctggagtgcagtggtgtgatcatagctcagtgcagcatcaacctcccaggctaaagggagcctcacacctcagcctcccaagtagctgggactgcgagcacacaccaccacacctgaccaatttctgtatgttttgtaaagatggggtttcatcatgttgtccaggctggccttgatctgctgagctcaagcaatcttcccacctcagccttccaaagtggcgggattatggacatgagccaccacacctagccaagtcccatttcacttaggaaaaaaatcagactggttaccatgcccgtgaaatgaggtccatgtcctgagcttcttgttgatgtcatttcgtgtcactcttccatcagcccctgtaccgcaggcgactctggcttcctgagagtccctggaacaatttaagattgtgtcctacccctgagtgtttgtatgggctcttccctatactgttctccgcatggccggctctttcttagccattgggctgtgcctcaatattattttctcactgggattttcccttatctactcatcttctggactgtcaatcagagcattttgattgataacagtttaatcagtaattatcttgtttgtatatacatgtctttaatatgtgtctccctctctaaggtcactgcattccagtgagaaccacctctactgttttgtatatgacattcccaatgccttacaccgttctgaacacagtgttgcttaaaccagtattgaatgaatgaaagatagaaagaaaatggtcagccctgagtaattttctcttatttttcttctcttttccttaatatcatctgcagacacatctgcagagtattttttttttttctgtgagaatccatttctacctatgatatagctggtttctgacccttgagatatgactccaaaattgggactgggtggttgagagtgctttaggagaggtaaaatttgtcattaatactattgtttatgtgtgcagtgtccttcatattttttcctttcatatagcatttgacatttgcaaaatgttttccatttatttttatgttggggaaagcaaaaagccgtacgtgttttttggtgtaagtgagcataaaagcaaggcatctgattcagggtgatattttttgtcattttctttgtgttttgatcagggaaaattagagagagagagaggaagagagaggagaaatgacaatgcgtccaactgttttccagccctcctccaccgcattcccgacccagctctcagggagaggactgagccactgtagaaaagtgggaacattaaacgacccaagaaaatgtgaaatggtgtggggtgtgagatttctttattagtcaatttaaaataaaatgtgcctcagtaatttagaatctgtctggagtcaagcagaaaattagccatattcccatatcctacccccgcccctggaggcagcagaagcaccaataaaaataaaaataacaataccttgtatttatggggtagctttctcccagacctccttctcactcaccctttttatcttttctgtgtccttgaaggggagtgagtgagtctctgaaacctgggagttcagctctctgcagatacgatcctcagcattaaaacttctccaaagtccttcatttgatcatacattcatccatgggtttattggttcatttatactatttagcagtgcttactgagtatctacactgtgcttactgtgtatactgcttatacacagtatatcttacaggtagtacaagatcctagcaggtactataagatcctagaaggtaagagctactactatatagtccctaggagctattactgtaatgtctattcacagacaatggaataatcttgttagttttttttctgaaaacaatcataactctctttaaaccatggtgttgtctttggaacattcatagtttggttcctgtgtagttttcaaggtccgtaaaggctgagtttcgggttgatgtgtctgtaggctttttcccttgggggaaaacgtcttcatagaatttgctcctctaggtaatagatcatgaatatctctctagtttgcaaaaatgattgtttaagaaaggacatggatagacggatagactccatttctcctcttaaagatttcctcattttgaggggtcttggaattatttgagtgtttaatgaaagcaaagaacttcctccccagaggaattgatatatgcacaaagataacaccattttgtaccgtcactttagggttcacactttctggtacccatccttggacactatccatggccacccaggttaaaacttcttcttttctctttctttttctttcttctttttttttttttttttttttgagtcagggcccctctgttgttctggctggagtgcagtggtggcacacacacagcagctcactgcagccttaacgtcccaggctcaagcgatgttcctgcctcagccgcaaaaagagctggaattacatgcatgagctactgcgcctgaatctagacctatttagaaagttcaagtctgaacatttagtgatgccatagagagccctcccttcctgccagcattcattaaatgatggttttcactctgcagagcagcttccctccgctttccccagatagtctccctcccacctacatatgagaaaataaaatgttttcctgcatcactatgaaaaagagccctaaatcaatagcaaatcaagctatggaataaaagagtctttatggcccgagaaggtgattgctgaaggttgccatttagcagtattgggtttgtgtctccctggggtctccagcagcccagtgtctctgatgtgaggcacctttgcctacatgaaagtcagcccctctccccctcccccagtggagtgcagggagataagaattctgaaacaggtcagctgacgttgttttttaaaaaggttttgttctgggcaaatcctagccggatgtgactggtctgctcttttggtaccaatcctagcttgacagtgatccctttccagacataagcacctacaagtctcaggatggttttgctgcaagcagggggtaccatcccaatcatttctttaccccctacccttttttgtttcgttttgttttgttttgttttttgtttttgagatggagtcttgctctgttgcccaggctggagtgcagtggcgcagtctcagttcactgcagcctcaacttcccgggtacaagagattctcctgccttagcctcccgattagctgggattgcaggcatgcaccaccacatctggttcatttttttgtattttaaatacagacggggtttcaccatgttggccagtctggtcttgaactcctgacttgaagtgatccacctccctcggcctcccaaagtgctgagatgagaggcgtgagccatcacacctgggcttcttccccttttgccatgtgatttttttttcttgcacttaaagcaagtgcagaacctcatatgatgatctatatgcacttactgtgttttacccctctcggttatgttagtgggggtatttaggaaccatgctcattttctgggtgtttaatagctgaattctgtttcatttagatactgataagggtcttgaaatttaaaaaatgtatctttaagcttgacatctcccagtggtatggccctgtattagggagatataaaaatcatgtatgagtctccctatacctctctctgtttgtgttcccgcacacacactacttctccatggctcctccatatggccagtcctcttccttcatatacagcctagttctctgaggttcccatcccctcaagtccatgaccctctggcggagtagccgtagtggacaggtgcaccctccttcactaccttcctttctctgcaactagtcaccccatctgtgtccacagtttgatgactggctaggggctaagagtgctgtgattaaaactgctaacttcccacttcttttgactgttccaaatgggggcaagaatgaattttaaaatgaactttgcctgtcaaagcttgtctaggttaagggatgagcaatggcacagtgtcgtttaccccagagcatgaactgtttggtcctggttcaagccccttccccatttcccatgatactgggcctcacaatccatatgcaggaacagcagatgccacgtattgaaatttctagtttctctgccactaaaaatgatagctctgcttgcttgcaatatatgttgcctttgaaatgcacttgcagtgatggtctttcctatgcaagggcagagaagaaattgtctcatcagtatactttgctgaaccagctgaacccctcgcctacccagcagctctgtcacccccactgaggctggctttctagtgacgatgaacaaaggtggtcttcagctttctgatactagagagagctaggatgcataggccatcagagttaacttttgtatttctttcaggtcttcttgggtttctcattgaaacaaagcaagaagaataagcttatgatacccagcatattcttcagcactccagaaactcagaacccagcagataacgtaaaaataacaatgcggctgggtgcagtggctcatgcctgcaatcctggcagtttgcgaggctgaggcagacagatcacttgagcccaggagtgtgagattagcctgggacacatagtgagacccccaactctagtaaaaatacaaaaatatatccaaggatgtggcacatgcctgtagtcccagctacttgggaggtggaggtgggaggatcatctgaaccaggaggtcgaggttgcagtgagccatgtttgcgccattatactccagtctgggtgacagagtgataccctgcatcaaaataatgataaaaaagaacaacgacttttttttttttttttttttttgagatggcgtctccctctgttgcccaggctggagtgcagtggtgcaatctcggctcactgcaacctctgcctcccaggttcaagtgtttctcctaccccagcctcctgaatagctgggattgcaggtgcctgccaccatgactggctaatttttttttttatttattttttatttttttgtagttttagcagagacagggtttcaccatgttggccaggctggtcaggaactcctgacctcaagtgatccgcccacctcagcctcccaaagtgctgggattacaggcatgagccaccacacctggccctatttttaatttttttttcaacttttattttaggtttgagtggacatctgcaggtctgttacacaggtaaactgcatgttcctgaagtttggtagacaaatgatcctgtcacccaggtggtgggcgtagtacttggtagacggtttttcaaccccggccttcccactcccctgcatctcatagtctccagtgtcttttgctcttatcctgatgtccatgtgtactcaatggttagctcccacttacaagtgagaatatgtgatatttggttttctgttcctgcattaattcacttagattaatggcttccagctgcattcacgttgctgcaatgaacatgattttgttcttttttatggctgtatagtattccatgttgtgtatggaccacattttctttatcctatctgccattgatgggtatctaggttaatttcatgtctttgctatggtgaatagagctgcagtgaacatgtgagtgcgtgtgtctttttggtagaacgatttatttttctttgggcatatacccagtcatgggattgctgggttgaatggtagttctgtttaagccctttgagaaacctccaggctgctttcgccaggggctgaactaatttacattctcaccaacagtgtaaatgccttcctcaaggagtaatgcctagttagaaccttgcagtcacacaagaggtatacaaaggtaagagctgccacttcaagatcagaggccaaatgaaaaactttctctttagcagaacactcaagatgagcagacaaacctagtcacagccaatctctaggaagtgacgcacaattgacttaggaaaacaaagcaaaaaatgctgttctcagggctaactcagaggatttacaccaaatactgcctggggtctgttagatcaacaattaagatgaaaacaaaactttaaaacaaatggaagaagtttaaaggcacactctggcatgctcttggtattatttacaaaggagttttcctttcaatgttgtttataaggaaactccaagaagcctgattttagcatctatacaggccattatcatattaattttttgcattaaccaacactcccctcttttgaattttcacctcatcttaagttccttctctatgtattttaaaacctcttttgctgtttacatctcaacttcggatctttttcacacgccggcaggaggctgtatacatttaacatattaaggccgcagtgccgagttccctgaacagacaacatagctgtttgatcgagaatggagattttccaagtttgattttctaacaattcaccctttcccttgtacttgtgataaattccagttgtgtagtttaaatggtcattgaatagatgtgccgctctactctctacagttttaacatggttgaatgatctcaaaatgaggcaatcgtttgagcagaaacccgaagaggcctgggaggcagagctgcctgagactaatcctgagttcggcagccccaggcacttgccctcagacaggctctgagtatgtttgtagcaaagtgaccctcgggtcaccatcacctttttcattcttccttatgctcggagatagtcatctgactttgcatgtgcctaaaatcagtttagtctgatgcatttcatttcaagaaggcacaaagataggaaacctgaagccatagtattttgcttctttcctggcttagagaatgcgtcaagggaaggggccttctggtctaccaattctgcccttgttctttttttctaaaacatttcctttctcacagtgggagacagtctttgaaaacccaggtttccagacatggaagagagaaaccaagtattggaaatcatttcctactgcccagtttccccaattctcctccttcatgtttttttattcagagtcaagactgctggacttcctggtgctgttttgatctggtggaagagagagttgcaatatgactgtttgcttgttaaggagttggcagtagtcataccactcaggatgcagggtaaagagtcaagtctcttggttttatctctcaataatcataaaagtacatccattgatcccccactccattcccactggtgagagacttttgcttaagaccactgtctttcatggattggtgcaagcttcctgtggctctttctttttcttttctttctttcctttttttttttttttttttccccgacagggtctcattctatcacccagctgtagtacagtggtgcaatctcagctcagtgcaacctcctcctcccaggctcaaaagatcctctcaccccagcctcctgagtagctgggattacaggtgcacaccaccgtgcccagctatatgcccccgcaggcctcccaaagtgctaggattacaggcatgagccaccaggcttatcctcctgtggctctttccttccctctctacacccgcctctaccccattctgacaactgtagccccagtgacttttccattaagtaatgtctagccacattgcttcctactgaagactccccaaaggctcccagtcggagcacctcttccttaatgtagccctttctatctgacccctactcactgtctcatctaaactccagccacatcccgtggcttgttatttgcaaaatatgccatgtttttctcatactcagacttttatgtatggtatttcctctgctagaacccttctccacctctgttctgactcaacagagattacaactcttaggggaagctatctgtgaacctcctgccccagccaggttgcctgttcttccctctctctttccttgtgcttattccggtcatagggctttcatggtctgttgatgtttcctattagcagcctccttctgctagaacatgcacatccgaaggacaaaaaatatgttttatttacctattggctggcaaccatttaaatgtaagaggtaaaagagacgcctccacctatctgtacaaccttggctgtgtctcttaattctttatggacctctttgtatgtcttcacggttgtgtctatattagacagtgcccaccctacgttaatgccctatgatttgagattatttgagaacgtcatgaattggtccccgggctgtatttgaaaactgctgaatcacactccattgtgcaatgtcagccacaacttccaccattattaccactcaatggtggtaacaattccataaatgatgacaccatgaagaaagtaagggatggctaccgtgtgatcaactcttaacagatattttctctattacattacgtggctcactttcaggatattttcttctctattgacaacttaattctttacgactgctgtctcctccaggaagaattattgaaaagtaaagtgatgtttagaaagagataagtcaaagattgtttggatatcagctgttaactttttgcttcttacttgcaaaatagaatagaaccagcagtgttcactgcagcatttgtgggttattaataatttactcaatctattgatgcttgttaattgaagtcgctgagaaaagttagttaatgatgtgcctgcttacaccacattataattatgatggtagttcccctattattagggctgagtaggtgttcccattagaaaccttaatttctgagctgattgtcttcaccattttaaattacattgggccacatcttggcagacactttctgaaagcagatacgctcctttccaaaattatttttgtggtagcacagaagttctctccctcaaatgacagaggctgttaagtgtattctactttcaggaactgttttattaagctccaaccagcaatgtcctatgtaaacttatcccaaaagaaagatggttgctgaactagaggctaccttggcaaaaatcagatctcactgggaaagtaaatttttaaaagtcactcatagaatgggagatgggccacatttttcttgccttcacttggattcagaatggttctgattacagtcaacagaaaccaaattccaacgtatttaaactttatattttttgacagtgagatttattggctcatgaaattaggactgcaaaagatatgttgtcttcaagcagggcagggtaaaggggttaaactaatgtcactaatgtctttacttgttcgtcatccttcaactccctcctgagtgctgacttcattctggagcagatcttcttcacagggctacttgtagcctctagaccagcactccccaacctttttggcattagggactggtttcatggaagacaattttttccagggatgggaaaatggagggaatgatttcaggatgatttaagtcctttacatttattgtgcactttatttctattattattacattgtaatatataatgaaataattacacaactcaccataatgtagaatcagtgggaagcctgaccttgttttcctgcaactagacagtcccatcttggggtgatggtaggaagtgacagatcatcaggcattagattctcataagccacatgcaacctagctccttcgcatgcacagttcacaagaggatttctgctcctatgagaatgtaatgctgctgccgatctgacaggaggtggtaatgtgagctatggggaatggctgtaaatatagatgaagctttgcttgctcacctgctgcttacctcctgctgtgtggcctggtttctaacagaccatggactggtactaggccatcgcctgaggtttatggacccctgctctagagtatattgttgacagtccctgtattgaagcaaagcaaaaccttctcacacatgggttccatatataaaacaaaagaaggtgtcaattctgtttggatcacatcctcacccctgagctgattcttggagttagaaggagagtgaattttgatttccagtctataccatgcgtccatagcggtagcacaagtaggctgtgcatagctttagtaaacccacccatggaaagtattctatcagtggaaagagagatgttgctaccagaaaaactacagaagggataatggacaaaaattaaattataaatttactactccatggttgcatccagtacctaatcccaacccttggctgacccgatagccaaagaaattgccatcaattgttaatggttatcatagttcaaaactccattaaagattttatttcaactaggatctttaaaaattgtggccttatggtctggtgctaccaaagagttagctgtgcaatcttgataaagataggcagttaggttcactggatttcatttgcatcattgatagtggcttctctgtggtgtctgtcttattggaaagatgtgagtctggtatgcgcagatgtcagtgaaaaggaatttattttgctttggaaatgcagcatgggcaaaataagttgtgtcctggttatcttgactcctggaaaaatagtttagaattgttcctaatggggtccaggtacgatattttatgtctaagcatggtggaccattttccctccctagaagagacaatggaaggtgggtggcaccgagtcttgcatgaaggcacttaatcatttgcaagactcaagtggacataaaaatgcaacagagatgttttctgagaacaaacaaaatctaggcaaggagggaaccaaggagtggccattgctggtgcataaaacctatttattcttatgaaagagagtgtgttcatttgtgattctaatatatttttttgtttgtcatttggttaattatgtagaaccatggcatggtctaatattttgtacaaaacttgtctcttaatgttataatctggctggagagaaaaattaaagcagctgaatatcctcctttcctcctgttatgaatccgtctgtgtcactggtggacataatcattttttttttaaattctgcaataactcaactttgagtctggtaatgtctctatcaaatgcatacctggaggcatgggtcagaatctcctgaactttttcatgtttattgatttatttcatttgataaacatgatctgatttactctgtggccaaactataaatgcaaccttttattttagtctttccttcctgtcccaccttccaggaaaaatttggtttagggagggaggacatgtattggattgaaaggacatctgttggccgggcaaggtggctcacgtctgtaatcccagcactttgggaggctgcggcaagtgaatcacaaggtcaagagatcgagaccatcctggccaaatagtgaaaccccatctctactgaaaaaacaaaaattagccaggcatggtgatggtggtggggggaggggggcgcctataattccagctacttgggaggctgaggcaggagaatcgctggaaccctgaagtcggaggttgcattgaactctagcctggtgacagtgagacagtgtctcaaaaaaaaaaaaaataaggaaagaaagaaaggaaaggacatgtgttttattgttctgcttgttttcagttatcatgagggggaaaagtaccatgaggaagatgccctcaaacaggctatcagatgtttttgttcttgataccaggcaggaaagagatagaggtaaattgttctagttaggcattaaacctggttttaaaaaaaacccttttaaatgacgagaatggagataaagagaaaaagcattctgttgacatctgtgtggatttgattctcaatttatccatcatcattatcatagttgtttttgttactagtatttagcaacagatttgcttaaataatgggctagaacttacaggggaatattagcaggtagaaaagcactcaagattgtttttgcacatcatagttcatcatccaaaagttatttgttgagcacctatgatgtgccaagtgttgtgagactaagaaataaccaggatcatgttactgccttggaggatcttcattcagtcggaggaagacatggcagagatacttagttacaagctctagtgctgtaaaagagacaagtgaaagatacagaggaaagggaatcactcatccatctctgcctgggagattagaaaaactaccactgaagagtgtgacacacatttcatgtgaatgtgggaggaagtttgaaagatatggtcccatcacagaaggacaatagatctttcctaagatttacctgacaagaggtcatttgcttgaatctgctcagtgacaggaccttcctacaaggcagccatttttgcaggccttgagttgttagatagtcttcctcttgttaaaactatttatatttaaacttgaaggcatttagaagatactgaaaatagtgggcagttgtaagaaaatgtgattggagaggcataaaacttagtttgggaaatggctagaccctcttcctttgtgtgtgtgtgtgtgtgtgtgtgtgtgtgtgtgtgtgtgtgtgtgtgaatatttgcatgtaccacatgttgtatacatggagcatcagtgagtatgggatacatattttaccaaatgctttatgagtattatttaatgttttcaacaactgtatgaagtttgaagtttgtattgttatgaaacccacttcataggtaaggaaactaggattacagagttttataactttgcataatgagtgagagaatagggatgttaacttttctttaaataactgtatcctcagaataatattttgacttgaattaggtagattctgtacagtataaattgctattgagctggaatattttgtgtggcggagggcatcttatgtgtgtgtgtttcttcaaggtatcaatgcaaactctccaaagcctcttgtttcagaaagataaacaactgttatcagcctacagatttttgaagaggctgagtactaccacaagatttattttaaaatcaagctgaaacaaagtttttagctttttaaaaaaattaattttgagagagtgaacttcatatcatcacctttagagttccagaatagcaagtcttgagaaaggaatcgagagttggaggattggccaggtacagtggctacttgtgatcctggcactttgggaggtcgagttcagtgggtcacttaagccaggagttcaaaaccagcctgggatacatggaaaaactccatatctacataaaatgataataatagaaaatagcaaggcatggtggtatgcacttgtagtctcagctccttgggaggctaaaatgggaggattgcttgagctcgggagttgtaggttgccatgactggagattgcaccactgccctccagcttgggtaacagggtgagcacttgtctgaaaaaaaaaaaagagtagtggaataagagaaataccaatattcccaggaattgggccatggaagagctatcagccacttgccttcctcccttctcctcccaccaaaaaaaaaaaaaaatatatatatatatatatatatatatacacacacacacacacacacacacacatatatatacagacacatatataatcattcagctattctaatatttgtatatgtaaatgtgctctatataatacctatatatgtgatgaaccatatgtagtggtcataaaattggatataaattttatgtctctataactggacattaaatctcattcctataccccattaaaaactgatctatttttccaggagccaaaataactatgtaatatacagatatgttttatatatatatctacacacacactcacacatacacacacgcacacaggtatataggtatacatgtagatagagtttcaccatgttgctcagggtggtctcaaactcctgggcttaagcaatctgcccactttggccttcaaggtgctgggatcacaagtgtgaccactgtgcctggccgatccctcaactcttgattcctttctcaagacttgctactctggaagtccatatatatatatacacacacatatatatgtatacatatgtatgtgtacatgtacatgtacatatacatgtagatataggtagtgtattatacatatatagacttgcagcatatgtatatacatatctgtacatatacatgcacatatacatatgcgtgtacatatatgcacacatacatgtacatatatgtgtgcgtatagttgtacatacacatgtagatatgcatatatgtgtacatatacatgcacatatacaggtagatacacatctatgtgtgcatatacatgtacacatgcatgtagatatatatgtgtacatatgcatgtagatatacatatgtgtacatatgtatgcacatttgcatgcagatatacatatatgtgtacatatatatgtatatacatatgctggaagtctatgtataatacactacatttaatttttaatagttttagtagttctatagtattcccttctatgagtgagacatttaatggattccttattgatgcatgttaaatggcttgagttttgttgcttttctacttcaaacactgcatctgtgtatacttctatctctctgtacttgtacatgcacaattataggataatttcttatttaatggctagatcgatttacttttcatagatattgctaatatttgccctccaagaaagttttatccgtttacattcctataatatatgtgataacctgttctctttacagcaaaaagtgcctttaaaaaaacacttcccttataacaaacatacatcctctgctgtcagattgtgaaaggctgaaggaaatttacaaggagctctcctgtttttcccctattatacttgattatgctactaaatattcagccacttccatgctattgagtgtgggagaaagcaatcgtattctcattggcacaggataagggaagcaaactcacctgagcatcgtttcagccttagaattgcaggctggaaagcctctccttgtgtgtgtgcattggctggcagctgcctgccatgaatgctacccaggctctcaaaatgggaagaagaccatatgcttgattactaaatgaattcacaggacaaactatcacagaaaacatgtgtaatatgagataccatttcaatttggcaataaatgtatggtaaatggaaggttgcagcccatgtaaaatgcacttaggatctagtgttgccatggagtcaaaggaaatgttatggcagcagataggtgcaattctgccctggaatttggcactctgggattcgttgggggcctgtggaactattcagaatccagtgaacaccaaccatggggctttgcatagcttaagtccaggcacgtgaaaatatccgaatagggtctgggagctctgaatttcaaatatcattggttatttgatctaaactggattaaggtggtggaaatgacagtatctctacacgccatagccactctacatgcagtcccacgcatcacctcattttgtggtcactgcagctcttcactgggcaagtggaaacagcttcacaaaaatcagactctaggcaagaaattggatttacatgttttccctttggttttaaagaaaatgtagataaaaatctgatagtctacttcagggaggacaaatatatttcagcttctctgttcactttgacccattggtagagacttccgaggagctgtgtttgctttttcttaattaagcatttaatgttgagatgattttagatttgtagattgacaaaaagctgtaagaaataatacagaaaaattctatgtagcttttactcaggtttatccaatagtaacatcttgaaaaactacagggttggctgggcgcggtagctcaagcctgtaattccagcattttgggaggacaaggtgggcggatcacaaggtcaggagttcgagaacagcctggccaacatggtgaaaccctgtctctataaaaatacaaaaattagccgagcgtgccggtgggctcctgtaatcccagctacttaggaggctgaggcaggagaatcacttgaaactggaaggcggaggttgcagtgagctgagatcacatcactgcactctaccctggtcaacaagagtgaactctgtctcaaaagaaaaagaaaaactacagggttagggttatcacaaccagtgattgatcttactgatgtagaaagatatactggtcttatacagacattgataccacctactgatgcaatctcctgacctttttcagatttccctagttaaatttgtactcctgtgggatgtatgtttgtctgtgtgatgtgtgtgtgtttactgtgtgtatctatgtctgtgtggtgtgtgtttgtgtggtgtgtatgtgcctgtgtcctgtgaccatgtgtttgtatgatgtgtctgcatgtgtgtgttttgtggtgtgtctatggtgcgtgcacgcacgtatgtgtgtatggtgtgtctgtgtgtttgtgtggtgcatatgtgtgcatgcatctgtttggtgtgtgttgtttctgggtggtgtgtgcatgtctgtgagtagtgtgtgtgtctgcatgcatatgcgtttgtgtggtgtttgtgtctctagtgtcagcacttgtttgtatggtatgtgtgtgtgcatgtgtgtgtatggtttctgtggtgtgtctttgcacacgtgtgtgtaattatttgtattacaaacatttatcacttgtgtagtttcatgtggccaccaacacagtgaagatatacaacagttccatcaccacaaggatccctcagattccccccatttctctcacccctacccccgtccctacctgctggcaaccactaacctgttcttcacttctgaagttctatcatatcaagaatattatataaatggtatcatacaggatgtaacctttggagactggcttctttttctctgcatactgccctggagattgtttcaagttgttgcatgtgctaatagttgattgtcttagattgctgagtagtattctatggtgtcaatctaccacccaagaatcttttttcagtagacaccctgaggctgagcaggagagggtgccattgtcactgcgtcatgcctatcccagagacagggattgagaggggtggcaagcccctggtgaacctgcttggcttacatgtatgtgctgatatttgaaagagaatcagaaacgggacaggattagcatctatgtcactctagagatcagtatccaggattcagaagggtcatgagggctgtcactaaggggactagtgataggctggaaatcacgctccatgcgctaggactatagcttccatggcagaaggcaggatttgaacatgagtccccagccactttttcagtgatctctctactccgctatagcttcagtcatctcccgcttatcgtgtgtgtttgtgctggttctggagagcgcacaatttgcagaaggcagttttgtttggatctgccaagtacaaatgtggctggctagtctgttggatagcctgacaagacccagaaatttctgtctttcctccctcccatcaaataactgggctcctccaagagccaacgcatacatcccacctgtaccaacagaatgttgtagtttgcatacttggaatggaaaaataatatttggcttggctttgatcatatatactaattattgctaatataggcaccagatgattgcattttattatacctttgtttttcactaaatatcagaattccttccttgaggggggagttgtcatactacttaattgttttgtgttttcttgacatatctaagcattatctgtgcaactgtgtcagtgtgcctgttgctgtaaatattcaagggactcataacagtattagaactaatttcttaccacaacagaatattatccctttcataattttcaattgtttcaaaggaattctgaggattcttggtttccaaacttcatatgacttttgactttttttttttttaataaagtacagcaaagagttttatgactatgtgctttagaggccagatggcattgttttcttcctgtctttggcaggtttcaggcaagttgcattagtcttctggactttgactgcctagtgtgtaaaatggcaatgaaaaagtaaacgaataaaccagactttgtttcttcttctcttctgtacttttcatcttcttcctcctcccttttccttccttctttcgtaaggttgcacaaaataatgtacattaaatgtgtaacgtgcagcatgaactacattttatacatatagataaaaactgttatacatatttttttatttgtgtcattaacttgttcttgttgattcaatgaagattacctgcagttagctgaaaagtcgtaatacaaacaattattttatggctttcttttttcagtatgatttacactgtccagttatgtctttttgaggcataatcttcatcttagttttcctggggggtttttctgtaactcctgtgctacattttcaggcagtttcttaacataggtacctatgtctattcctcctcctcctccgcctcccccttttttctccctcctccgtctccccctttcttctccctcctccctcctccctcctccttcctcctcctcctcctcctccttctttttcttcgttcaatcttggaagctttccaattcaactctaacttcttcagcccgtcttttacttatgtgtagctaataccacatttatatcagcgacaaaccttcaatggttaggaaaaagaagctaaccctttattttctctttagatgtgttggtccatttgttgtcagtgttttggttcaggttgttcccagctacccagatgactacctttcatcatatttgcagagtgtatttagtgtttacatcaagaccaacctctgggattacaaaataattttataccactttctatctctgggtgattggaagtggctatctgcagcaggactatgtggatgatgatgaggtcataggcaggttcgtggagaaagagtgctatgattgattaatgatgtctgctgtgaccatgagataggggaatgcagtatgtgtaaggaatatttgctaaccgttttaaatgaatgttctttatgcttttagcattgctttaaaatggataacaaaattcatcatatatttgctaaatacacattatacctaagtgtataaataacatttatacctaagtgtgaggcacttgaaaaactcttctagtcattattgcctgtaattctttcttcactcttaggggttaggaatcatttttaattcctattttacagattcagaaagagaggtacatgtcagtgaagtcctttgctaaggctgtgtacctactaagaatcagatttaatgtttgaatctcggctaagtaatcccagggagctttctatggaggtaaggaagaggatcaggttcacaaatgcagaaataagtgagtttttctagtgagggtttctgtccttcatttgagcagcttcctttatgactcatctttctagaatcttgcaagaatacaaaccaacatttatagaggtgatttcagcacaagcactggatgtttagaagtttctagtcagtcctaaagtgagaagacagaacacgttcaattgatttccatttgcagtgcccagaatgagaaaggtgatgtttattctccctggtaaacacactcaaaggttttggggttacccaagttgagctttccaggcaatgaaccactaaaaacatatttgttcccagaacacagccagctagtaaggttttcccactggggctgacatttactgtaacaagagcctgtttccttctctcagagctgcagccagctcctcacaagggagttggtgtcttgccagagaaacccctctaagctccaagagacgtgccagggaagccagtgcttttccctttagctgaatgtgccaataatggcagaatgatgtctgctttttaaagtgacaagttaaaatattatctacaatttatctgtccactcatccatcatctacttatatttcctctctctccatatgtatatatatgtatacacacatacatgcacacatatgtatgtatatatctatttggcgaaatgaatatatttgctcatttaatatcacagtaattctataaatataatttagcaaattttatgatgctccattgtgcaggttctaaaaatgataaaagaatctagacttctgggcgcagtaactcacgcctgtaaccccagcactttgagaggttgagggggatagatcacctgaggtcaggagtttgagaccagcctggccaacatggtgaaaccctgtctctactaaaaaaaaaaaaaaaaaaacattgccaggtacgcgcctgtaatcccagctactggggaggctgaggcaggagaatggcttgaacctgggagacagaggttgcagtgagctgagattgcgccactgcactccaccctgggtaacagagtgagaccgtagctcaaaaaaaaataatccagatttcatgatttctagataaatacaaggcaaattgaaaacagctctcctcctcctcctctttctccttcttcctcatcttttgttgttaaagaattatagacttcaaagctggagaagcagtgtggggtattccctggtcctccttccaaatgcatgttgaaatgaagacatgtgggttttcttcccgttttggccatcacctgacctaatgaccttgggccagtcacctggcatctccacgatcctgttacattgcatataaatgcagacttctttgtatgatgtctaaggtcacagagcaggtattatgcccatcttgtttatctgccaagcacagtagggcacccataaataattcctaagttactgaatgcatctgcagctcaacacttttgacatttttttttctcattttaatattggccaactgagatttgaaaaggttttgacttgcctgagttaaagcagggggagtctactggccaatttcttttgactattacgttgtttgatttggacgaaggggcagggggttgtataaacgtcactgtggagagcccttgtcccctggtgatgagtaaccttatcaatccagagcaaagaggcatgtgaggagattttgctttggaaaatggcacacagttgaggaaatttcatcaatgtgtatgaagcggctggtctggtgacgttttgctttgcaagtgggtgactgacatccttcaccctctgatctgcccattctctcctttggtccttctgttcccgttagcactccctttaacatcagtctctctccctcttcttccacctagaatctcaataagctctttcatcatctcagtttctacagagcagaataagctgaggacttttttttcaagttttatttatgtgtttttctgtttttttaatttaaaaatttaatttttttagacagtcttgctctgtcacccatgctggagtgcagtggtgcaatctcatctcactgcaacctctgcctcgtgggttcaagcgaatctcccacctcagtctttcaagtagctgggactgtaggcgcatgccaccacacccagctaatttttgtattgtttttggtagagatgaagttttaccatgttggccaggctggtatcgaactcctgacctcaaatgatccatccacttcagcctcccaaagtactgggattacaggtgtgagccaccgcacacagcctgttttttctaattttaatttcagcaggtttttggagaacaggaggtgtttggttacacgaataagttctttagtggtgatttctgagattttggtgcactcttcactaaagcagtgtacactgtacccagtgtgtagtcttttctccctcaccccctcccaccctttacccagagtccccagaatccactgtatcattcttacgtctttgcgtcctcatagcttagcccccacatatgagtgagaacatatgatgtttgcttttccattcctgagttacttcacctagaataatggttttcagctccatccaggttgctgcaaatgccattattttgttcctttttatggctgaatagtattccatggtctgtatataccacattttcttgatccactcattggctaatgggcatttgggctggttccatatttttgcaattacaaatagtgctgctataaacatacgtctacaagtgtcttttttgtatagtgatttcttttcctctgggtgaatagccagtagtgggattgctggcagaaatgatatgtgtcttttgcaaaaatccaaaccagaaaagagtaaaatttatatactatgtgtgaaaagccccctctaaatcctcttgtctagagaaaaccacttttaataacgtgtaatttcttttctgtgtatacacacacacaaatacaaacacacacaatgacatttcaaaatcgtgtgcacatcacatttctattcagttttcccctacctcatggctgtatagaagtctgttgttaaggtggtattataatttaatcaaaaatccaccttctgatcaactaagttgttctcaaccttttgcttttaaaaacattgctgttgtacttctttgtagacattgtcaggtaactgcaggagaggcaataaattttaaatggataagagaatgaattgtttgcttcttgaattaatgctttgaatcatcaactggaataggatatggagttggcagcgtgtatcacagtaacctctccctgaatttggagccctataaaacaagttgtgataatttcagtcatttcagaaaagcttctgggtcataaaggagagctactattccaaattcccacctttgtctttggtagccaaggatgcaatcctgtcagtagtcatccattttcgcaggtatctgctgggtccctacttgtgttgaatatcatgtcaaaaactgagcaggaagggattagcaagacagtctctatctctgccacaggtgtgacatgcagtcgtgaggttgtgcattgctccaagatgcctaagcaagggggcagagagggtgacacaccttgctcacaagccatgcaccctggaatgggctgtgcccacccagggtgaaaaaatggacttaatggctactagaggcccagatcataactcttctgtaataataataataataataatgataataatcattattattattattattttaccatttgagatggagtttcgctcttgttccccaggctggagtgcaatggcatgatctcggctcaccgcaccctccacctcctggaatcaagccattcacctgcctcagcctcctgagtagctgggattacgggcatgcaccaccacgcccggctaattttgtatttttagtagagatgaagtttctccacgttggtcaggctggtctcaaactcccgatctcaggtgatctgcctgcctcagccttccaaagtgttgggattacaagtgagagccactgtgcctagctcctctcctggaatgattagatttaactttgttctccaattcttagacctgtgactctgaatagggtggggatgttcatcttgatttgccttctgctagaccaggaatgaagagatggatgatattactccttttgatgtttttattcttgaatagatatgttggattctctgtctcttgccccctgcaccccaccgcatgcacatacacacacacacacacacacacacacacacacatacatacatacaccccagatttcctttgaaggagtgcatagtctatttttgttgttgttgttgttgaggtggaatctcattctgttgcccaggttggagtgcagtggattgatctcagcccactgtaacttctgcctccgggattcaagtgattctcctgcttcagccttccgagtagatgggattacaggtgcatgccagcacacccagctaatttttgtattgtcagtggagatggggttttgccatgtaggccaggctggtctcgaattcctatcctcaagtgatccacccttgtcggacttcccaagtgctgggattataggcgtgaaccaccgcacccggccggagtgggtagtctttattcaagaaaattcccaaatcagcaaatagcttgtgagcttacaggtgaggttctgagggagtgggttgtaaggaaagatagaaaactatagaggagtccatgaataaatgtgattcagaggggagggggaatatgaaagagaagaacagggtgggtaggaagatcagaggttggagaagaaggaacaggatggcctcaaagaagcctagagctgaggtggccagagcatggttaaggacagcctcgtcatcggttatgggctgtgtgccttgttgttgtcatggactggccctccttcgacacccctgagcagtctggtgaggaaggggtgagtgtaaaccatctttgccccagtctgctgtcagccgatgcactaggatgactctaaccggcatgtcaaggcagacttcagcagcatccttggatgagtgcgcactgggtggatacaggacagacagccaaaggagtgctgctccaacccatgcggcatctctcccaggttgtgaaacaactcgggggtggtgcaggatccacgctggggactgcacagacacagccaccagtagccttgctctcatttgagtttttctttctttactgatgacatcagagagaaagccccagattgctgcattggtgttctttttttttttttttttttttttttttttttttttgacagtttctttctgtcgcccaggttggagtgcagtggtgtgatctcagctcgctgcaacctccgtcccctgggttcaagcgattctcctgcctcagcctcctgagtagctgagactacaggtgcctgtcatcatacgtggctaatttttgtgtttttagtagagaagggatttctccgtgttggccaggctggtctcaaactcctgaccttaagtgatctgccagcttctgcctaccaaagtgctgggattacaggtgtgagccaccacacctggctgaaaataggatttttacggatgtcactcattaaggatctctaggtgaaatcatcctggacttagagtggaccctaagtccagtggctggtgtttcaataagagaaatggagggagatttgaaaacacagagactcagaggagaaggccacgtgaagaccaaactagagctaagagtgatgcagccacaagccaaggatgccaggaccaccagaaactggaaggaacaagaaagaccctcccatgcagtctttggagggagtgcgaccccgccagtaccttgctttaggatttctggcctccagaactgacagagaatacatttcttttgtttcaagccacagtttttgataagttgttactgcagccctaggaaactaattcactagagggctgcaaactaaggcctgagagccaaatccagcctgacacctgtttttgtagattttattgacagaaacacagccttattcatttacgtattgtctatggctgctttcactctgcaagggcagagttgaataactgcgacaaaaaccatctggcctgcaaagcctaaaatatttactatctggccctctgcgaaaaaagtgtgccaaccgctcttctagggaggtgtttaatttatgtgcttgtctggggatgctgcggggtaggggatgtttgtagtgagagtctgtctttaacagcgcagaaccacacaaggtaaggattttttttaaacttacatttcaatttttatgaagcaggttttttcctccttagaggaaaaacatgaaatgttccagaatagttgacagcattagctacatttaaaagattcaaggaagcaaaatggttttccgtctgttgaatcagtcagcattaaagttcacttatcaatgatggcttttctatgagcagcagctttgtattaaaatggctaatgggaatgtggttcccctagcaagctttggtttgatctagaatttttggagagtctgagtgggttttcttcttctcagcatgaaatggaccaaggtctgttttgcagctgagacataaaggaagtgaaaccttgtctgatatgtgctagggtgcagagccaggtaggaaatgggaaagagtgtacctcaaacctcaacagccacattgtccaccaattctcattgcatgtgaattcgtgaacctcattggcgagctcaaagaggtggctataggaaacctaattataagcatcatttggctcatactggtacagaaaaccttcaattaagttgcagaaaaatggccacacacagaagaaagaagttagaagggtttttctggtattcttggtttacatctcagtggaagcaatttttatgtcttctgcatatttcactgagaagcctccaccacttctagccataacttcctttccttcctgttacaaattttcttcctagatttactcttcagtccctaaaaatatccataacacattatttattcactccataatgtacaccatccaaatacaacaattttgccaataaactgttattctaatgaataattcatgcagtcttcattctcctgacatgaacaaatatactttcaaataggaggagtgtgcctctatttttgtcttaactccatttcttaatgtcatatatatttttaaaggtttgtgatgtccttccttggatgaactccatggggaataattctgatactctaattaagagcaataaactatagcacagaaatataactagatttatagacagtgtttgttacagtgacagtgtagtttgcatgtggagggaggaagtaggcaaatcattcagtgtctcagggcaggaaaaatgtgaagttctcacctattaagaaggcaacaccaataattgtttcaaattttgacaatattcatggccatagtttcctcatatttatatgaacaggatgtgatgataatggtgacgatgaaaatcataataacatattattatgtgatgtaatgctaagaattttgagtttctatgagatactagccatttactaaaagctttgcatatatcagggtttctgaatctcagcactatgggtatattgggtcagataattacttgttatgggccaggggttgggggatccactgtgcatttgcacgatgtttaacggaatccctgacctagggtatctgctagattcagtagcacctgcctcttcaagttgtcacactgagaaatgtctatagacatggcctaatgtccccaggagggtaaaatccccttgtagaaaaacagtgatgtacatgattaattgcatcttcaacacattcctaccaggtaggtgcattatcagtcccatttaccagtgaagaaacagaaattcagagtgaatgacagaaccaaattttggtgcagggtttactactacaccaatgtcaagactattttgttgcatatgatgatacagagcattaattcatctgccttctcctcttacatgggtattttcacattttaaaaatgtataattgcagggtgcagtggctcatgcctgtaatccctgcactttggcagggccaaagcaggctgatcgcttgagtccaggagttcaagacctgccctggcaacgtggcaagaccctatctctacaaaaaaaataaaaaaaatagctgggcatggtgacacacgcctgtggtcccagctacttgggaggatcaggtaggaggatcacttgagcctggggaggcagaggttgcagtgaaccaagattgtgccaatgcactctagcctaggtgatagaggaagaccctgtctcaaaataaataaataaataaataagtatttggtgtatgcatgctgggtaattaatatatcttatgttttgcacagacagaacttcaaatttccaaaaccccttttatagaaactgtagcatgatgaccagattaatactttttaaaacaatagcaataataacagtaacaatttatcctcctgctcctcaccactgttaattgagcactctgtttttagagatggtgtcttgctctgtctttcagactggagtgcagtggagcagtcacagctcactgccgcttgaactcctgggtgcaagtgatactctcacctcagcctcctgagtagctgagactacaggcacaggtcaccacacccagctaattaaaattcttttttttttccaagatagagtcttggcgtgttgcccatattggtctcaaattcctcagctcaagtatgagtagatgggattgcaagtgcgagccaccacttctggctaatttagcactttccatgtgagaaactaaaggatttgactggatcacctgtttaattctcacatcttagaggtacccactttgggtatcttttagccctaagctgtataattcagagttgttttgttttctttgggtttggtttctgctgtatcctcacatacagtgaagtttccatacaccttggttgaatgaatgtcttcatgagcagctacagtcttagggaaaacatgtagcttattaaggtggtgacagagcttccacttaaatccaggagatcccttgcccttaaatcctctgctgtctgctctgcgcagttgagggtttcatcaaaacgtccagctctgctctcagccatctggttgggtctgtcttttatgactttatttgtatatcaggtttccttttgcaggtgatcctaaaacacacactctcccgtcttgctccagtctgctcaccctctgcctctcacctgcgatgtctccttcatttccatttgtctgaatcttatttcttgttggaggtccagctccatcccagctttcttcccaaaccctctccctatgtcttgggcactctcaaggccttacttgccaccattgccagtcggcaattggcgaggagctgcacaaatcacaggcacccagtactaactcccaggtctaaccctccatgaactatgctcttaggaaagcagcttaaagtccttgaaaccccaatttcctcatccctatgatgaggactgcagtgtcattgtacatcccaatttgctgtgagggttcagtgggaaaatgcttagctgagcacttgacacatagtattttcttgatgaattcctgccaccgctaatgtcactttatccctgttttgtatgttccctggttgctttatgtatgtgtgcttttgaactagattgcaggattatagaaagagatttctttcagtgtgaatccttaatgtgacacaaaattcagcacaaggggtaaaactgtggccaagaggccgcctcagtgtttagaatgtaattttctctctttatgttctgaaccgtggtgtctttatcaatgacatggaaggggccatttccatttacttcaccatgccagaagggccattgcaaatggatttagttatagggtaagcaatgagcttgtgttttctgaacagctaagcctcagaactgtaataactcattatcaatctgtctccatacttcatcaaagttcccaggtgctttgaattttggcttggccattgtctttttttagctataaaattttgcttatcgcatagtttaaagtgggatgatgactgagacacatctctgcttatgagtaccacttaagagaggatatatcctcaggtagaacaatttccagagaggagatgtgggcacggggtctgtgcctgccctggaagctgtgtagtatagtaggaagaatcctacattcacagagaggctgatttttgcttccagttttgtcacaattcacatgatattgggcaatttagaaaaaaatattgatttgctttaacgttctcatctgtaaaatgaaacatcccaattagataagttataaatgacctttcatttttagaattctgcatcctggaattaaagtgcattggaatgagccaataattccatattttcttatattacctaaaatccacatactcttcaataaatttaccaccatagggttttcaaaccccatcaaaaaaaccacttctttcatgtaaatgcccagcagtttatctctttttactcctcagtaccctacacatcttcctaataaagtatataataaaagtaaatcttcccactagtgtgtttatagtgtgaaacacattgttattcccaccatggcagtggtggataaaatatacatatttctctgtctcccacaaccaccctttgatccccagccttttatcagcaaatccaaagtgctaccttctgcaaattagcactacctcctgagaaattgtgccaagttccattaaatgtaattagcattcctgttgtttccttcatattggagaaaaaaaaaagaaaactctctcttacttactgggaacacacatcatgccaagttgtagcaacagaggcagcacaaggctgaaagcaggaggcagagggggatcttgacacacaatgatgagttcacctacatgggggctcaggtggcagacacagaggtgtcagtcttggcttttaaaagtaaaagttggcttcccaatgtagagttaaacagatggcagagtgccttctgaagtgagggtttagagaacatggggagatggttatctgcctcaatttgaaactgacctgccatgagattcccaaggaagagacttgaatatcctagagcagttaactacaaaactaaaatttgccccctcagtatggttttcgtgtaaaagaattgcaaaacaaagaaaaactaccacgtgtgtattttccctagaatttcctggtagaaataagatattagtacccaacaagtagaaaagaatatgagttcagaagaaagactagggtttagtatcagacatactttttgattattcatatttcataaaatcttattttcttgacttataacaaaaatcatacaactgttttattattaacgtaaaattaaagaaaaacatcactacttttctcctcccccttttatttcaaattacgccactgactacgaaaacctggtcaaatccaacgtgcatttagaaaccataatttgaagaaactaatagctggagctcagtgccaccatccacaacagatgtccttccaaactccattcactgtcatgctataaaacagaattcagaaacaacagggtatacgtatatatctgtgcattcagtgactctgaaagggaggcactggtttcgaatgttttgtgtgaacacgagttccatttgacacttttttttttctctcagaagtcattttgtctcattccttgcttacttcattgtatttcagcatttgtcatctcaattacagtagtgcatactacttttacacttcaactgcaatattcagaaacaccagggaaagagcagtaaagatattaggaggtggtaattaagactgagaatggctccagaagggtggaaacacatttaggatgttttttattttaatcatctgtaaagaaactaattccataggcccatctacagttaagttccacttgcagcacaaagcatcataaattgaatagtaatattctttatcccaatgtcatacaactgttgtcctataatactgtgacgttgaatcataagacacacgttaaataacctattatgctcagtggtttctctgacagttgaggatgagaccaaaacgtatcccaccctgggtgacgcagagaaacgaaatgaaagacaaaccatttggtcttccaagaaagagttcagtcaatcacagtgaactggttggagtatattcattaaacaaatatttattgagcatctgctttgtgttaaatgctgaatggtgatttaagctctagatttgcctttcctggacaggttgtagaaataaatccacacaatgtgtgatctgcatctggattatttaatttagcagaaagtttatccatgataaacttttttttttcgtgaacatgaggatgaacatgaggttcatccatgtggatgcatgtatcactactttgtttctttattattgagtaatattccatggtatggatggaccacattttgtttatccatttacccatttattgatggatacgtggattgtttccagattttaactattatgtagaatgttactatgaacacttgtttccaagttcttgggtggatatatgctttcacctttcttgggtagatatttaggagtggaattgctgggttgtatggtaagtttaagtttgagcttaagaaaccactaaactggctgggcgcagtggctcacacctgcaatcccagccctttgggaggcagaggcaggccaatcacttgaggtcaggagtttgagattaacctggtgtaggtggtgaaaccccatctctactaaaaatacaaaattagccaggcgtggtggtgggtacctgtaatcccagctactcgggagtctgaggcaggagaatcacttgaacgcgagaggcggagattgcagtgagccaagattgcgccattgcactccagactgggagacaaagcgagactcagtctcaaaacaaacagacaaacaaaacaaacaaaccattaaagtatttttccaaagcggttgcgttattcaatatccccaccagcaacatacaagcatccaggttgtgccacatccttgacaactatttgtattacttatctatctttcaaattactgccattctagtgggtatgtggtgatatctcatcatcatggctttaatttgcattttcctgatgtctaatgatgttgagcatcttttcaggtgcatgatctttatgtttgtttattttttatttttaattctggggtacatgtgcaggatgtgcacgtttgttacataggtaaatgtatgtcttggtggtttgctgcacctatcaacccatcacctcggtattaagcccagcatgcattagctctttttcctaatactcttcctcctatccaccccagcccccaataggccccagtgtgtgttgttcctctccctgtgcccatgtattttcatttttcagctcccacttataagtgagaacaaagtgcatgatctttcaatgaaataaccttcttcgcctgtgaaatgggtctcagtgaatcttgaggaatcttacattactacctataatttcctttcccttataagtcagcaaaggcatgggcaggggcctgaagtgggagaaagagctcctccccctttaacgtggattcagaaatgtgtgacagggagctgagactttcgctgcctggtcatactcattgagcctatgggctggttgtgtgaacatgccacaggtaggcacatagggctcataggcaaaggatcccatttgtgcataaggcacactttgaaaggtagggtttggatccattatctcaccccaacagctgtgtgcctccagtgtgcagcttgaaagccacgtgttaccctgtcagttcaagcttcccgaggttacctcttccagccacgcagtagttggtattatttctttcatttttttgataaaatgtcttcctctctccttctcagagtaaagcaagtctctgcacatgtttctcagctgggttgcagtaatctaggaaaaggtcactctttagaggagttgaaaggactccaggttcttatattagccctctgagcatataaaggcccaaagaaacagacaccaattcctctgctgcacagacttttaaacctggaaagctgtaaatgcagaaacttaagtatctgggaggtgcgtgcttagcagccatccgatgtgagtgtcagttcattttgacatgtaaccaagatggacctcagccaatagcagtctccactcacagaccgctggtgtggttaggagcatgtacttttaatcaaattttttttattggaatcccggtgctacatgctaggtgtgtgattttggacaggctccttaactgtgttagctttggttaatgaaactgtaaaatgagattaataataattcttggttcttaaaatcatggataggattacatgagataatgcatgtaagtgcttagcaccattttgcatttctttagcttttatcgtttttatgttatatttgattttacatctttggcactgggaagaatgcctggcatatagagtgtactttgtgactataatttgaccacacacagttaagatattcatttatataatagatatgtacgaggtatctattatgtgtacgaggtatctattatgtcagtaaactatacctctcgggaaaaatccagctctcctcttgtttttgtaaatacagttatagtggaacacagccacaccccttcatttgcatatcgattatggctgtgtttgtgctacaacgacacagatgattagtgacagaaactatatgggtggcaaagcctgaaatatttaatgtttgcccctttactggaaaaggtttccgatccttgttctaggtattgagaatgaaacaatgaacacaataaggtgatattcctacttttattatagtcaaggtaagacagacacgacacatataaataaatatgtacttacctatacacatatgcacaaaacatctgtggtaataaatgtaaagaaaaaaatacagaaatgtaagacagagagaaagcaggaatggggggagaggaaaattttttagatatttcccatttaaatgcctctaatctcagaatagaattttatagtatcgctttagtaattcatttacaaggtagttttcaatagaaaaataaaaactcactaccccatgaagtctcattgagcacaaaattcaggaaccaccccaggttgcaaataaattcagacattgcctgtcataaaaagctggttcggagacaactccatttagtattgtagaactgtgcaaagaacacgacactttgctgactggcatgcatttttgtccaggagtagttttccccacatggagaatagcgacaatacaaccgcttccaatcaaaggggaaatttgtgctccttatctagcttgattgtccatggataagaccaagttcaaaagtgtcagttctacaagcaaacaaacaaaaagccctgaaggcctcaagagctgaggatgcaaggaacaagtagagtttccaacacagaggaatgataaatgctggaggtgatgggtagtgtaaataccctgacttgatccttaaacattctatgcatgtaacaaaataccacaagcacactgtaaatgggtacagatagtatgtatcaataaaaaaaaaaaagaatacaaaaagaagtagatcagggatgctttatatggttttctaccttgtgtcttattttcaggtgtgttttcacaggcactacctttgtagaacaggttgcttgctgtgacagctcctatctgagcaaattgcattattaactagattgaaccaggaggtagggcacttccacaaaattctaggacaggggtcagcaaatctcttctgtgaggagccaggtcataaatattttagattttgcaggtcttttggtctccgctgcaactcctcaactcttctgttgtagcacaaaagcccctgtggacaatgcataaatgaatgagcatggctgtattccgataaaactttagttacaaaagcagacaggatttggcctgtgggttgtggtttaccagcttctgttctagtgtagtttttccttttgtaggtgtgctcagaagatcaactggagagcagacacaacatgctcacgctctggttcctttcttctgacctattgattcagaatctctgagagtaaaggccagccatgtacacttgtactgttgtacagatgcagaaagtcagtatgtgtcaggatatgctgctgttacaaataacccccaggatgtcagtgacagcagcagcagcaacaacaacaacaaacaaaaaacatgtttattccttgctcatgcaaagcccaccatgggcatctctagggaaactttcctccacacagtgacctagtgattcaatttgtcagaggcactatcagcctgtcgctttagtttctgcaacacacagccttcttgattgacgtcactgagaaaaaccaagaggagaaggtcttccaatggtaattaaatgactgggtcactaacaatttgggcatagctacttgcaaggacatggcaaacacaatcttcccaagttcgcaggaggagagagaaattggatatgggtaaacactaaattttttttattcgttcataaattgattcaattgatgtatcgattgactgataatcattactaaacaatgtgatgtgtgcatggcaaagaacctatctgcatggtatttatgggtatatttctgtttccatcaccagaatttaaccagttatctacataagtgaaatctgaaaggaaactactctttagacctggggtcaggcaccttttactttattatactcttctacttgatggtaaaagtcattatcagttttgttaatcacatgccggacctcagatgtattgctgtcctaaaaagtcaagcacattatactgaccaaatgtgctttgatcacaggtgagacatcgggtttcacacctgttattctgcaagttatgtataaggaacatacttcatacttctttacttcctgtactgatccagtttggttggttttactgatttggttaacaagatcgtaaataatagtgaagtctctctctgtttatggttaacactgctggcccattataattttcggtggcagtgcatatggcgggtgataaactaataaagctgcagtaggaagaatagttctgcttttatttttatggctatttctttaatctgatgcataattaatgtacaaagttcaacttcgttttggtcagatcccagattactcgaggcatccggaggggttaatattttttggtgcatttgggggtaggaggttgggataaaacaacaaatttttatctatatggaaggatgcttaaccgggattttttttttttttccaaaaagaaaatacttaagttatccttgctttcagagttcatgtccattggaagtgtcaagagattctgtgttcaaacattctcaaagcaccgctttccccttaccccttacctaagagaacataattctaaaaatccctttggggaataattttctctgccttccatctctctcaatgatgtgtccaatctccacaatttgtctggcctcctcttgaactgatttacggttcaccaaaatctgtgagaggatttgccaggctgcagaccaattaattatgtttgctgttagacctgttaggtgttggcatttccattttgtcagacattttaaatttaacgtggacacatggtttccttttttttttatatattaaattaggaagctgaccacatagggggagattccaacagcaacacaatgaatttatttgagatgcattgtccttcatttgtatatagaactctttaaaaagaaattcaccatcttcccagatttttttttctttttgtttgagatggagtcttgctctgtcactcagtctggaatgcagtggcatgatctcggctcactgcaacctactcctcccaggttcaagcgattctcctgcctcagcctcctgaatagctgggataacagacatctgccaccacgtccagctaatttttgtatttttttttttttagtagagatggggtttcgccatgtttgccaggcagatctagaactcctgacctcaagtgatctgcccgccttagacccccaaagtgctggaaatataggcttgagccactgagtccagaccttcctagatattttgaacagagcctgcttttctcagagaaaatatttcttcttttgtccacagcagccctgatatccatggtgaatagtgtgttagccattttctgccttgcagaactattattataatataataatatccaaagaacagtagcaatttttatatagcatttactgtatttcagataatttttaaatgcgttttacatatattaactctttatgtccttatgtaatgctctagggagggtgctataattattcccatttttcagatagaaaactgaggctaagagaagttcagttacagataccacacacaagaaagggacagcatctctggaagtctgactcctaatcatgggtcactcttgtcatcagatgccgggcaaggtgaagccctacattctacagacgtgttttcagaaagtctacaccacgtttatgcactagtattcatttatctggtagggtcctttgattttattgggtagtgctttatgggctgataaatgaggtgacattaaggatagtaacactgttttcttcccttttctgtaaaaggtgagatggttgcctatggtgttagaaaggattgcaaaagatttacttggggaaaattagcttcctctgcactcccctgctccatttctactgtaagttattatgatgaaaaaaaaaaaaaaacctgccagaacattggcttcaaggtgaaaatatttaggcaaaatattaccacagggaaagtttattttaagcatcaaggttaaaaagacacatgtgtcagatttaggattttatgcttaaagctcatgacattgccacaaagtatttggttggcaaacttttcctgcagagggtcagataataaatattgtagggtggtggaccatacggtctgtgtcacaactactcagctttgcagttgtagagaaaaagcagtcataggcaatgcaaaagcaatggaatgttgcggcattgcagtaaatgtttttaaccacagtcagcgaggctgatttggtccacaggccatggcttactgaccccctgctatcaaggaatgaccagggatttggagataggctttcaatccttccttgtcatgtgccaggtggacggccttgtggttcaaagacttctttgaaccttgcgtagtcacaatctctctagatgttaaatagggaaactgctatgccccgatgagcatggtcatgagaactgaaggagtaccagaactgaatgaatgaagtactggattcagtaaaagaaattccatgtcatccttctctgccctctccaaacccctttggttctacttttccctaccttgtaatatttttgttaacaagtggtaagagttaattaggggtccctgagatttttagggtgcttttacattttggtaaggctagtagtagaaaagtactacctaaaagagaattaactaaattccttccttccttcttccctccctccctcttccctcccttgctctctctctctttctctcatctctctttctctcttcctctctttctcgcttgcttgcttgctctgttgcccaggctggagtgcagtggtgcgatcttggctcactgcaacctctgcctcccaggtccaagcgattcgtgtgcctcagcctcccgagtagctgggactacaggtatgcacgatgcctggctaggtttttgtatttttggtagagacacagtcttgccatgttacccaggctggtctcagactcctgagctcaagcgatctgcccatctcagcctcccaaagtgctaggattaaaggtgtgagacaccatacccgggccccagaggagagctttctgagtcaccatatgtgaagtggttcttacgtaatttctacggaaaaaaaactcagccgtcgaaatacaggaaggaaaagggttaatttctttgtaacagagatagtgaataacaagcataccactgattccaccaatctaatatacatgacacaaatcactgaaagataataatcttcactgataaactgaatgagtcttcagaagcttgttcatgacagttctttagtcattgtcagtgattcgtagttgtctcataaaatgaaacctattaggtatctttgacctagttaccttttagggtcagagactttggagattttttcagattataagctacatgaagttgttacagggttgctagtttaccttcgctttgtaaacagtgatgctcctctatagggatgtgaggttgaattccgagagtcacctgcccccctgcaaaaaaaaagaccaaaaagtaaaaagcatcttccattcttcctgaagccccctctcttcatgaaatgtcctcacattgaagcctgatgaattcgttcatgttcttggctcgaaagttcttagcagcagcagcagctgaatttctgttgtctgttcttgttttccttgtttttaccattttctagatattttatggtgaactgttgttatagaaatatggaaacaagggatagtcctaatacatcctgttgcaaagaacagaaacccagtttagactcagttaagcaaaaagggaaaatttagctttaaaatattccatagattccagaggattccagaggaggaagagcggcaggaagtacgatgaagcaaagaccaggaaagggatcagcaccctggacagcatctctttcatttctctttggaaatggagcccatcagatttgcctcacccctgacttagcactttgtactaaatcccttagaaatgccttcccttaatctccacattcctgagttttttatggcaattgcattttagctcaacttctatgtcttccaaagatcttccctgttcacaacaattacatgccctggtcataaattatcttattttctttgttgcttgtttatcatatgcaccttcccacactggaatctaagcttcctgagagctaagccttatttagaacaatgcctgacacataatgggcacacaacaatatttttgcttaaacacatgtataagtaagcgaatgatcccctaactgccaatttcctaggagagagaattgaattgccccagctgggatcagtattcaaccctctttttattagttgaggcagagtgggttgagtcagatagaacagccacttctcctggctgcctgtgtctgaagggaggtgtacttgatttggggagaaaaagaagccatggtgaatcacgaaaacatattccccaatgacaagtgtatcgtgcttgtcaatttacagagggtagtgagggtaggggttgatctcaaatttgacagaagaaacagaggtaatttttttctacctgaaaatctttaccagcacttgaggccagtgggcaccatgaaagtatcctgaacgaaagtgttttatttctctattgttattaaatagtgaaaccttcgttgggttcatccaaattttagctataagagatgctttatctattttttctttactttgtcaatagttctgaataaatgtgtgtgcttaagtgtgcttgcacatgtgtgtattttttttccaggctttcagaagcctgcattaataatctcttagggtcccgaagcaggaacatgtatgagaatacagaaccagatgatatcttcaggcagaaatttaggaagagttgactcacactgaacacaagctagttcttaggcttactgtcagaacaaaattgataaagcttaggaggacatttcatctcctttcagtgtggttcagcaaggagctatttaatgcctcctattgtcaggtgtggttttaggtaccattcgtatcaggtctctgccctcatggaaccaccattctaattgagggagtagtttaaaggggatagatgggaattaataaaccaataaagagaggctaaaatttcagactgcaatgatgacgtcattaaagaactgaaataggatgatgtgaactgaaatgatgaggggcgatgcagatggctggaggtggcctaaagcccaggaaagtggtggtggagaagaaggcaggattggtgagaagagcctggcagcacaaagatgtgtgtaaaatcactgacaggaaagggctttgtgtatttgaagatcataaaaagagtagcacagggctggaattagctccgtgaacaagtggagagaaggaagtggagaggcagatcaaggaggacttctttgcttatagcaagggggttgaattttagttttaggacaataggaagctgtggaatgaccttagagggaagacatcatccaaatgacagtgtactctgttccttagctgaagagagaaaaaaacagatgcaagtgcaagaggttttagtagaagtctaggggatacatgatggtggttatagcatatccacaaacacctcatgacccagggtgtctgttcatctgcattgcatgcatgtttttacctcctctgacatagttatttgcagccctgtctcatggtcaaaagttagccaagtgattgaagtatgacatattggctgtgcctttgtgacaatccttagtcttgtctgtttagcaaacagtatggcaagttggaattctagagcagtcacagtataccatgcttgatcacatgggtatacctaaacagttacaaacccccaaacctgattatgagctcttgtgaaacttctctaaaaatttggggcaatgtggagttacaggtagaacttgagcttttcaagtcagaaaccttagttctgaatgtttgtgcctctatgtatcaactcagaactttagaggagatccttgccctttaggtgtgtttgtgtgttgaagtgttactaacactattaataatgtttacacatgggtaatattaaccataataatgcttacttggtgcccaaagtacgtttgatactttacatatgttacctctctcaagcattacagtaaacatacaatatgcataggatagccccactttgccaataaggaaattgatccttagattaaataacatacttgaaattgtgcagtaagtacatggaggaatgtccatacaatatatctatttaaaccacctaacagtggggtattatggaagagcatatgggagcactttgcaaagtgtcaaccgcagaataagtgcttgataaatttcacattatacctctctctctctctctgcagatttcagtcacttatgaccacagaattaattctaaagaaagcaaattgaaggaggtgtttgcacgtatttttttttccctaatgattctactgtaccctggagcattttcacggtttgtgtttaatcacagaatctcagccatgatgtttctgacaggcaatttccttaatgcatttgacagagatggattacatggagggccattggacgccatggttttgtctgcaaatggtaagactagattagagctatctgggtctagtgcctccagtgatattgcatcctaataattcttatgataacatggatcacctttgtggacacacacattcttggccagatgggatacagtggttttcaagaaaccctgccacttttattacactttgagaaacatctggactaatatttgtgtgtcagaatcataaatcaatttagtttgcggagataggcctagttatgcggtttatcttcaaaggcactcttttttgctaccactgaaagtggtaaatgaggcacataaatgtcgagatattgaattccttctgaaactgtaaagtctttacactggcatatgaagatctgagcatcagtcagactctcaggtacttgatgaacaagagtgatttggattccatggcattttatccctagataacaacaaacccaacccattcttgagcaatgatacaattcccactggtgactcacttcctgaccctttctccccgtcctctgaagtatgtctcagccattagttcctatgtttattggcgcactttagtatagatcaaaggcacacagacaggttcagcgatatttgctaaccctgggaaacatgaatgctactattttgaaggatattctttatttgtcactggtatttaattgcacagatatgtacaaccattgtaaaggagattcctagatatcatgatacttatctctaatgacataaatatgtatataaatatacataaatataaatgtgtatataaatatttatataaacataaacatatttatataaacataaacatatttatataaacataaacataaacatatttatataaatataaacataaacatatttatataaatataaacataaacatatttatataaatataaacataaacatatttatataaatataaacataaacatatttatataaatataaacataaacatatttatataaatataaacataaacatatttatataaatataaacataaacatatttatataaatataagcataaacatatttatataaatataagcataaacatatttatataaatataagcataaacatatttatataaatataagcttaaacatatttatataaatataagcttaaacatatttatataaatataagcataaacatatttatataaatataatatttatatacacatttatatttatgtatatttatatacatacttacgtctttaaatataagtttcatggtatctaggaatctttgtgtccttagagattctatatgaagcaatgacattattataactaacagcattaacttaaatctatcctgccatcaagtatccagtctgtattaaaatgtattcagtgttttgaacaatattctttatgacttatttttaaaatatagctctctaggccaggcacagtggctcacacttgtaatttcagcactttgggaaactgaggcaggcaaattgcttgagactgggagtttgagaccagcctgggcaacatgaggaaaccccacctccacaaaaaaaaaaaaaaaaaaaaaaaattcagaaattagctggacatggtgatgtggtcccagctacttgggaggttgaggtaggaggaccactttagcctcatgaggtcagggctgcagtgagccatgatggtgccactgcactccagcttgggcgatggagtgatactctgtctcaaaaaataaataaaaaaataaataaaatgtagctctctagtcattttgaagtactgaaatcatatgtaagaagagtaggaacaagtagcataacacaggatataaataattaaagtaattttttcttaaagtgcatctgtccttccttaatccttctgagagattatcgatcacttaaaaaattgtgtgaagtcttacaaagaagtatatacataatatgatactataagaaagcccttggccaggcacggtggctcacgcctgtaatcccagcactttgagaggccaaggcgggctaatcacgagatcaggagatcgagaccatcctggctaacacagtgaaaccccatctctactaaaaatacaaaaaattagccaggcgtggtggcgggcgcctgtagtcccacctactcgggaggttgaggcaggagaatggtgtgaacccgggaggcagagcttgcagtgagccgagatcgtgccactgcagtccagcctgggcaacagaatgagactctgtctcacaaaaaaaaaaaaaaaaaaaaaaaaaaaaaaaaaaaggaaaagaaaagaagcgcttttaaaatcttagaaacaaaaatcgctctctgtaaaataatattcatcagcatttttcttaatggtgagaaattagaaacaacctaaatttctgacatagaaaattgcctaatttatggcggtcatattggaaaatgttcaccatgtattgtcaagtgaacaaagtggtttccatgaccgcatgggtcaaatcacagcactttaagaatcaactcacagagagaacaaatctcgagaatgtatctgactgtgtgctagccatagttatctctagatagtgagattataggccatttttatttcattttaacttttctctgtttctcacattttttgcatgcaatgtggaatatttggtaattgtgtttaacaattttggaagatcagccaactcagcaagaggtgtattatctaactggaaagaaaaccagaggtataaatacgatggaatgaaacactccctgagcctgtgtgcattctgcataggcttcttgaaatagtccatggctgcagagatggaaaagttaacataagtgctttaagttaaaatgaagaaactgttgtacatcttcctatatttcctttggctatctaagtcctgcattagaatgttctgatattttctgaatggggttttatgaaaaacctagagttaaaatttgcattgcagttagtttcaaaatgctatttagaggaagcttttagctgcatgttacagaggtctaatatggaccctaactgaagttatgcagaaaggaaatgttttgctgtgtgtgtgggtgtctgcaccttttctccccatcacccacctcgttccctgaatgctattttatactctaagcaattaagagtggtttatgctgcagacttttccaataagcattgactcattataccagtccagtatcattatcctgagttgaacatgtcctgcagcaggtttcatttattctgctgcagtcttcatttctaccatatatttggagattcagatacagatttgccttgtaattgtcaaaagtaagaccgcaagagctggtatagggcatgctacgaaggaaccaaagaatgacattgagttggctgttaaaaatgcaaattttggagttggaaaggacatcaagaaaaaggtttaaggaacagaggatacagacagctaaggattggggaaagttctttgacaccatgaagactataattgcagcctgggtagcttgataaaccactcaaggaagggttggttcaagaacatcaggctagaggcaagtcaagaccttaaggcatttggaggtgatacggagtgatttctcgaaaaggaattctcaatggatagaatcctcataggaagacctacactgattcaggtaataaggagtgatttctagaaaggaatcctcagggctgggcacggtggctcatgcctgtaatcccagcactttgggaggccgacgtaggtagatcatgaggtcaggcgatcgagaccatcctggctaacacagtgaaaccccatctctactaaaaatacaaaaaaattagccgggcgtggtggcgggcgcctgaagtcacagctactcaggaggctgaggcaggagaatggtgtgaacccgggaggtggagcttgcagtgagctgagatcgcgccactgcactccagcctgggcgacagagcgagactccctctcaaaaaaaaaaaaaaaaaaaaaaaggaatcctcaatggatagaatcctcatagggagacccacactgattcaggtattctctccagtttagaatacattgcccccactccaaaacactatgtcccccaaaacacacacacacacacacacacacacacacacatacacacacaaaatagagcacataagccactctatgcagcataattatctgtatctcattttcccttcatttgtaaactagcctaccactgggaaaaaggtaccataggttataaattactgatggggtctaggtcagcagttcccgtggttcccacagacacctgcaggcaatcccttctataactttccctatgcatccagcaagtaagttttctttctttcctccagctttctggaagaatctgttcaccattgtacatcttgatcgcctttatgtctgcaataggcccaactcacatccataagaaaaacagatcattctcctaattgaaatagaagagcttgggcaagacatcaattagtgatgcaaatgtagagttcttcattgagcaatgacaaaatcccaagacttattagaagaccaataagaaatggaaaaccatgatttactggcagggctagcacagttaaatttaaaataaaaatcttggccgggcacagtggctcactcctgtaatcccagaactttgggaggccaaggcgggcagattgttctaggtcaggagttcgagaccagccttgccaacatggtgaaaccccgtctctactaaaaatacagaaattacccaggcatggtggcacacctgtaatcccagcgactcgggaggctgaggcaggagaatcacttgaacgcaggaggcggaggttgcagtgagctgagatcacaccaccgtactccagcctgggtgacagagactccgcctcaaacataaataaaataaaaataatataaaataaaaaataaaacttccctcattgtttttgttgtcagcctttacaagcattgatgcttccaactcttccacaaattcccaacaggtatttttacatatcatccaggcattttttttttctttcctgagtgatactctgatctctatctgatgagctggagagtgacctaagttagaagggaaagtagaggaggttgctaagagggtaggtgtagtactgaggtatagagggttggtagagtggtattgctactcagaaaccagtaccacatgaaatcagaaattcagctccccagaaatcagtgccattccatcaacaaacagatccactgtgttctcctggccttgcatggttctaggtttgtagagcaagtttttaattcgggtttatggcattgctcatattcgccatttcagtcatttttggtaacagttacgttgagcttatctgcatagacgcacatgatgaacaaggattgactattcttcagaggatgttaactgtttagagaatcatgaaggaagcatattttacaaagaccttttttttttcctggacttctccctaatcatctcaatcagaaccttgaaaaaggggcccaggaatgcgaagtgtatgcctgtctcccacccccacatagtgtctagatgatcaatcctattcggggaccccttggatgtgagtgtgatatcattagaacataatgaaactgtgattcctaacccagaggaaaatccatcttaattcttcaccatcatactttatagttagtgctctcttccaaaggaaacccctttcaacccctctcattttttaatatggaactttgtcttaataatggatttcttcagtctttaatatttgatgggagaagtaattccagtcatggcacatcagaaagttgctttttttcctctttctaataagacgtataatccgttgctgacaaaaaaagaaaaaaaaaaaaacagcacattgctacaatatttcctggatgctttacaatacactgtgacaaatggcgcctcatgttgtacaattgtcctcatggcttgtaacacatcatttaatgaattgatcacagtggaatgtaaagatgaagcagcatttattttgtatgttatattgcatataatttttagagttgacatttataaccatggaagctgttattttacatatcatcttcaaaccatatcagccttaaacacatttaaatttaataagcaagtagattagatttgcttttaagctaggcatatcattacagtgcgtgtttccgtcagaagggcatgctcacgattaaatactgtcttcagttgttttaaagaaacaaaaattttaaagaagggggttagagcgaaagctgaaataattgagtatgaagccctaagaattctctgtggtggacaactgtaagcatagccttctaaccattgaggcgaaagagtccgtttggttttattaaccatcaccaggcaactttgaggcagaatgtaagccttgggaatgaaatgcaaattctataataggaacatcattgtgataataatttattaaatttcctgagccgtctccctctaaggagggctgcacaaacggccctggtgattaatgttcaacatcgtttaacattttattagagggaaacagtttttaatctattgatgccctgtctgtagaattctacgagctgttttcaaaaccagagaaagggggataaaaaaagaagcaaaaaataattggtgggggaagggggtaggtagtagaaggaattcgcaatagcggttctagttctgatgccagatttctcagaatctcctgtgttttactggcattttattgttttagcctcttggtagcctgttgatgttttgtgcaaggagagagagtttccttgtgaatctgacgttagggaaaatgtcatattcagtggagaggttccatctaagagagttggggtgagaaattggctgaactgggtgcttctctgaatcctagtagtgtttgcttaggagctttagactcaaatgcctatagaggccagaagggtcccttcaatggagattataatacgtggaatgtagtaaagtacttagcaagcactcttcactttgaataaatattgaggtactgaagcatcaactgtgagaagaccaaagacaaataacagcaaaatactatgtgaaatcatagaggagatccagacacacgaaaagggggccaaatggaaaaactaatgcaatagacagtttagatcatagtattgtttcgacgtcaatttcctggtacccatcattgtattatgattaagtatgatgttaaacattaggagtgactgggtgagagacccaggagtgctctatattatttttgcaatctttctgtgagtctaaaagcatttcaaaataaatacaacatttttaaaaagtaaaattggaacatacaaaacacactaatacggaagatgaagtccgaggatcatgtgcttacaacattgttacttcgccagtctcacaccctcttctgagaacaatgtaaaaagcagagagaaagatctcttcccctcctctttgtgtcgacagacatctttgggttggacaaggtggtaggcaaaataatgcccttgccttacctatggccatgtcttaatctctggaacctgtgagcatgttgggttacactgcaaaggaaaattaagattacatgtagagttaggcttgctaatcggttggccttgagataggcgcattatcctggattatctggatggatccaataggattacatagggttgttataagtgaagagggaggcagaagagagagagtatcagagcagctcttcctgaaaagaactcaacacattattgctgtctgtaagatggaaggaagccatgagccaaaagcagcaggctgccgctagagtctagaaaaggcaagaactcagattcttccctagaacctccagaaaagaacatgccccacaaactccttaattgtagctggatgagacctgcatcagatttctgaactacagaactataagatgggttgtttgtgttgtttaaagccatcatgtttgaggtctttgttacagcagcagtatcaagctaatacaggcaagtaatcaatataactgcaaatgcttttatggtccttacacgtgccagatgctcttatgagcattttacatgcattaccgtccttgatccaatgaggcaggtactacattgtgtattctgctttataactgaggatactgcaacagtgtgatgttaacttgctcgctgtcacagagctggtatgtgacaaagcagatgcttagtcagaaatacagagcccatgctctgcaccagcaaccatggtagacagctcagaatattagtactagactctagcacaacaggtcctagaagatattatggtaatgtatttacgtaactcaaaatgatcagacatgtcacaagaatgaaagaatgacagactaaaatcttcttggagagttgactggaaggataagatattctagtagcagttgaaaatatagtagcatctatctctagctatcttttttttttttaaggattggctaaaaatagtctttcccaagtataagccgtatcatattattatggatttagacgggtatacatgatgctattaaataacattgaatcaattattgggagaaggagttattctctttccatttctctttccattaccctattcgtgtcaatgagaaagtctttatttggtactagagtgtcttaaacatctctctaatactttgtgatctctgtttttagtaataaaatggaagcctccggctcagtgtctacaggtaatggttgttagattttaataacttgtgattgcactgtatttattttatggctaccttttattcagaataagtgatattgttattttatcatttacattactgatatccagttgccttttaaaaataatgcatttcaatttaaacaaagcacatcaatgtaaaaagatactaagcagctgacaatttatgattatggtacaggatgaccgtctagtgactttggcagtggaacggctagagtttgggaaaatctagctctttggggctaaagatttcaaaatgtacatttaaattaccaaacagatactcattactaaaactcaatgcctgaaaccatctttgaatccattctgttttctacccctttcccagaaacacttcgttttattacatttagaaagtggtgaatttagcccaggcacagtggctcatgtctgtaatcccagcaattttagaggttgaggtgggtggattgcctgagccctggagtgcaagaccagcctggggaatatagtcaaacctcatctctacaaaaactacaaaaattagctggacgtggtggtgcatgcctgtggttctcgccactagggaggctgaggtgggaggattgcttaagcctgggaggcagaggttgctgtgagccgagattgtgccactgcactccagcttgggctacaaaatgagaccctgtttcacaaaaaaaaaaaaaaagtgaagaattcaaagacagctgaataacacctttcaatattttatcgaggttaataaaattgattggttcttaattagttgtttattgttcttctaattctagcaacaaaactttaaaaaattatactctctgaattttaataaagagctcttcagtctatcaacacccttaagtctgtcaacttcaccatgttttgtgcctcatattgcatttcttgttggaccagccatattaggagttggggtggactctgttcatggactgagtttcccagaatagccttatatttggtgataatgtctctggctgagcctcattctcttaaattaatttcatcacacaggcttgcaaaataaggcttcttgtgaaagtcttggttgcagtgtcttttctagccagtttcaccaatgacctggtgtgcaaatttgtccactgtaagagtatcaaagacatattgagaggaggtgatcattattacacgacctgggcaggtggctgtcctctaatattggcaaggcaaaacagaacaactgacccaacagcacagatttgaaagactgtttgaggacctacgatgcttgctcttgctctctttatttatgtatttatttatttgtttgtttatttattgagacagagtccaactctcttgcccaggctggagtgcagtggtgggatctcaactcactgcaacctccacctcccaggttcaagcgatagcctcagcctcccgagtagctggaactacaggcctgcaccaccacacttggctaatttttgtatttttagtagaaacgggatttcaccgtgttggccagactggtgttcaactcctgacctcaggtaatctgcctgcctctgcctcccaaagtgctggggttacaggcatgaaccactgtgcccagctcgatgctcataattttagaaaggtgcctggtttatatttcttataaatgtgtcactgaataaaggttagcccacgtgatatgattttttctttcattctctactgccacactgctatttgtggcaagatctaaggagtttcttccaggctgtcaccgtctgaaaaaaaaaatgtgagtatcatatttcccagcctcccatagggagttttaattattattattattgttattattattgtttgctcttttctcttcatcatcctactcctcctcatttttctaaaggaagtaaaggaacaggcttggcccaataattttgaagtataaataatcagtatgttccatagtcagaatggtaataatgattccgttaactcagtttatttagtgcttgtgtgcatggtgaatgtaatgttcttgttatcgactgtgttatcttcactctcccctttcatcctgaagatgtctcagggaatttctccttcaacttttcctacccaccctgcttcactccccctctccccagccccatttgccactgacttgcttagcagcacaaaatcaagaaacatctttcattcagaccattgccaacactgatagtgtaggtacccaaaggtccaatggcttcccaaacatttaagaggcgtctacaatgtgcaggttagtgcaaccggctctttaaatgcacaaacccacttcaccctgacaacaatcctgagccatgaatatttttattcgcattttttagaggaaaccagggtcaatgccttcaaagaacttgtagttaggcaaaggagacaggcatgtgtgtataactataagtaaaatgcaaaggcatctgtgtacagagggtcaggagtcatgctgcaaagtgagtttttggaaggtttgcggaaagaagggaagcctgggcaggcttttgaggatgggtgggaattttttcacacagatgatttatggaagggtgtttcaagcaaagaggacagcatgtgcaaagggaaaaggaaatggaattctgagccaaaggtaaatatgcacagctaaatataattagagtggtgtgcagaggggaagttgggttatctgaaatatataaatccagtggtctaatctttgcacgcaagtctgggtaattttaaggagagtttaaaagactccatttcgaaggtgcacaccatagccatctttcagccagttgctccttgtgtgctagacacctgaacacatgtattactcctgttccatctctcccagttattccttctctacccatctccaatctgtccttcattctagcgttctctggtttctccaggctgttgaaactaagtacagatgtggctcttccaagcctccttcatagccgttgtctttagggatgaagaaaatgaataaggaaaactgtggctctgagcagctattgcttcatgtcgtggttgaagcaggaagcgactgagcttgctatcgattttaactcctgatcttgggaatcccagagcttctttctgtttctggagtgatgtttttctttgaagctaagttaaaaggtagtcatggggagagagcctaaaaacctgtgagtggaaaaaaaaaaaaaaaaaaaaaacatcaagctgtgatactgcagaattatcacagatagtgtaaaactgtgtggccatgccttaaaaaaagttaaacataaaattaccacattaccaagcaattccacttggaagtttatttgcagtaacattgaaaacaagtactcaaacaaaaatgtgtacagaaatgttcatcacagcattatccacaatagctaaaaggtggaaacaactcaactgtccatcaccaggtgtgtggataaactaaatgtggtatatccctgtagtagaacgttattcaacagtaaaaataagtggagtactgatacatgctacaatgtagatgagagcattatgctaagggaaggaaccagacacaaaaggtcacatgttattccatttccgtgaaatatccagaataggaaaattcacagagacagaaaacagaatgggggttgccaagggagcaggaattgggagtgtaactgaaaaatgatcatgtgttttctcttttttcccccgttccactcagctcataccttgtggttttctttctttctttttttttttttttttttttttttgagacggagtcttgctctgtcgcccaggctggaatgccgtggagcgatctcggctcactgcaagctccacctcctgggttcacgccattctcctgcctcagcctcccaagtagctgggactacaggcacccgccaccacagctggctaatcttttgtatttttagtagagacggggtttcaccgtgttagccaggatgttttcaatctcctaacgtcgtgatctgcctgccttggactcccaaagtcctgggattacaggcgtaagccaccgcacatggccaatatacccggtggttttcttctggggtgatgaaaatgttttgaaactagacagagggtggtagttgtgcaacattgtgaatgtactaaatgctactcatttgtacacttaaaaatagttaattttatgttatatgaattccacctccattgcaaaagagataaaatcaaaaacaggaagacagagtgttttagtttgttttgtgtttttgtaacagaatatctaagactgggtaacttaaaagcaatcaaagtgtatttggctcatgggtttggaggctggaaagtccaagagcatgacactgcatatcacatgggctttcctgctcctccatcacatggtggaagggcaagagggaagaatagatgaactcacttttataacaatccactcacatgataactaactcactgcagcagtaatgactttattcgtgaaagtggagttctcgtaatctaatcacctcttactgggcctcacctcccaacactgttgcaatggatattaaatttctgacacatggactttgggggacacattgaaaccatagcacactatcagaggcaaaatatagtgttggttcccaggcaatgagttggctgccttgttcacagtttgctcagtatgaaccatgcttgcaggagaacccctgaaatcaacccttagagaaatggtgtccatctgggaaagtagaaaaggagacagctccaagcaccaggactgagtttcagttccaagggacaagggaagtaagaatatcatcaccacaggtccgtcctcctccccagaggaagaacacaggctgcagaggtgacagctcacaatgttagggactgttgatgagaaaattggaaatggatggatttttatggcaatgcatttttaactgcacttcagcatagagggggacattttaaggagctaagagcttaaaccagacaagatttccttcagtgtgataataaatacaccaaagtgcccttttatgtttaataattcaggatccactgagtgtttaaagggttttttttctgttttatcatttgaaaaatcgaatggtaatcatttaaaaagtagtaggtgagaaatgttttccaaataggccctgaatcatgcacttcaaaatgtctttggaaatgaatgactgagtgtttcaggcagcgtacgcctgaaggtttggaagttttaacacagccaaacacctgtcattgctgtgtatactcatgttcagaggaatggtatctacttccatacacagaatcagccaataatctgatcagggctgggatgaaattagacaaaaaggctgggcagtgcagtagctcacgcctgtaatcccagcactttggcaggctgaggcagaccaatcatttgaggtcaggagttcaagatctgcctttgccaacgtggtgaaaccccgtctttactaaaatacaaagattagctgggcatggtggcaggcacctttaatcccagtttgctcaggaggctgagacccaagaattgcttgaacccaggaggtggaggttgtagtgagctcagatctcataactatactccagcctgggcaacagagcaagactctatctcaaaaaaacaaaacaaaacaacaacaacaacaacaacaaagaaattagacaaaagaacaaacaacgtgttggggaacacttttgtaatctcattcttgaatgtgctcagaatgtggatagtcacaatcatagagccagatttctgggaaattctagagtgaaatctaaaagtcagatactagtcataatacataatagtgtcagggacatgaacacatagcaccaacaaaactggtttgaattgttctgggctacaaattgggcctccacctggaatataatgcaaaatcctaggaagtagtgacttttagaaaggaaactcgactgtccttgtagatggtaaggatgatactgtggttctgagatttaaagcaggtaggttttcccagggagtggagtggagaagtgaataacttaatggtgacactaagttggcctgtcttatggaagagcctgaatgtgacaggaagcacgcatgtgcatcgttaagtatcatcttagaaaatataacccacaactgtgctctctccatattcagcaaatgtttattgcacctctatttatggtgtgcctgtcagacactgcagtaggcactaaggatgatgttgcaatataccccacagacaacatcactgcttgcatggagctcatattttctgctcgaggaaaaacattcaagaaggagttgtgacagaaactgccagctgtctacccagtatccctttatgccttcttttaaaggaatagagtgcttggaaatagttcacttagtcagagtcagtatgccccaaattaaaggataataatgctgtgttcctcggcttagcagagagggatccccattaagatggcagtgaaaattattagacatgcatcctgggaaaagcctctaatagggactaactcatcgtgatgaaaacaccataggccctttcatgctttctccgcgctgttgtatgacattatgtgactttgaggcaacttcgttggtggaatctatgttctaaggataatggaataaaaaagtgaatgaggcaagaaggtttaagatggaatatgtagccctgaacttcttgtatgggagagaaaaattaatctatattttgtttaagccaccattatttggggactctctaaatagcaaccaaattgaattttatgagatcagtgtgggaatcacaaatataaatttatttctgaatgtaaaaattgctctgcaggcaacaaagctggaagatatgagagagaggaattggggcaagggttggagagaaagacctctctgaggttaaaacaaagtctggtatatgcacctctcagggagaaacatcccaaaccaaaggaatgccagataccaaagtgagcaacacagcatagcagagaaacaacggagagccaggtagtagaagaggtgaagtcaccagctgaggtgaaggaaacaggagagatcaagtcctgtgtctcctattgtgggctatgttaagaagtggggattctattctggctgaggcaggaggtccttagtttgatctaggcaagagaatgccacgatctgattcttttttttttttttcttttcttttttttgagacagttttgctcttgtcgcccaggctggagtgcaatggcacaatctgggctcactgcaacctctgccccactgggttcaaacgattttcctgcctcagcctcccaagtggctgggattacaggtgtccaacaccacgcctggctaatttttagtatttttagcagagatatggtttcaccttgttggctaggctggtcttgaatccagacctcaggtggtccacccacctcagcctcccaaagtactgggactacaggcaagagccaccatgcccggccgatctgattcttatttacaaagcttacccaggctggtagagaatgggcacggcaagcgtgaagttaggaagctcatttgggcagtgactgtagactgtagatcagagggagtattgatggtggggtagacttagatggcagaggagatgtacgagggatttatttcagaggtaacactggcagaacttgcagaagtttgggaagccaattaacacctaagtagcatgtgttaggaggatatgcataaatgtagaatttgcattgactttggaagatcctcccatggtctttctcctagagccgcttaactgtctccaaaaatcaatatgggttactcaacaacaacaacaaccacagcaatataaacaacttgattaaaatggttaaaggacttgaatagacatttcttcaaagaacataaacaaatggccaataagcacatgaaaaaagatgctcaacatcattaatcattagagaaaagacaaataaaaattacaatgagataccacctcacacacattaggatggctgcaaataaaaaaaaaaaaaaaagaagcacagaaaacacgtgttgataaggatgtggaaaaattggacccattacgccctgtgggtaggaaggtaaaatagtacaggtgctgtggaagacagcatggagattcccaaataattaaaaatagaactgccagatgatccaacaattcttattctggatatatatttaaaagaggtgaatgtagagcaggggtccccagtccctgggtcatgtagtggtaccggtgtatggcctgttaggaattgggctgcagtggatgagcaagcaaagcttcttctgtatttacagccactcctcattgcttgcatcagcacctgagctcgacctcctgtcagagcagccacggcattaggttctcacagcagcacaaactcttttgtgaactctgcatgtgagggatctaggttgtgcacttcttatgagaatctaatgcctgatgatctgaagtgggacagtttcatcctgaaaccatcccctgcaacagccccccaccctggccattagtttatcttccacaaaactggtccctggtgccaaaaaggttggggtctgctgaagtacagcctcaaagaaatgttctttttttttgagaccgagtctcactgtcaccctggctggagtgccaggctaattttgtttttatatttttagtagagatgggatttcaccgtgtgagccaggatggtctggatctcctgacctcgtgatccgcctgcctcggcctcccaaagtgctgggattacaggcgtgagccactgcacccagccaaagaaatgtttttacactcatattcataacagctaaaatatgggactaatacaagtgtttatcaatgatgaacagataagcaaaatgtgatactcacacacgcacaatggaatattattcaaccttagaagggaagaaaattctgacgcatgcttcacaaatgagccctgaggacattattctaagtaaaataagccagtcacaaaaacacacgcactgtataattccactcacatgaagtttgtagtgaaaagcagagagtcaaggagaatggtggtggctggtggagaggaaggtaggggaaaggacagttattgtttaatgggtacacagtttcagtattacaagacaaaaagagttctggaggttatggtggtgatggttgcataacaatataaatatacttaatgctactgaattgtatgcttaaaatggttaagatagtaacttttatgttgtatttgtgttaccactgtgaggaattggaaaattatagaggtgggccgtgcccaggattgcagtgagttttcagctggcacagctttgtccatgcttctcacagctcagatagggtccctctatgtgtgagccctagtccacattttggttaatacatggtctcttccatttctctgtttccctttgcaaatatctgcttggttagtgactctttctcgaaatctcctcataacccaccaagcaaaggcaatcttgtgccttcccagcaagtgattgtcttaccggccacggatttaaccagaaatctaagtttgtccagagagccagtcctcagaaggggctgaagtcagaactagtcaagaaggacaggtgcacatttacatatgatttgcatctgctttacatagggctgtacaagctgtgctgtgttctcaaacatcacttacgttatattttaagactgtcgcaatctttaactaacatttcgatctgcagccagggtgcccctgacttctccagatttccatatttaaactggctacaactctaatccatgggaggtgggaaatccacggcacccacagggtatctgcagatacctgccagaaggctttactttctcagagtaaccattcattccaatgatccattctcaatgaaccatctcatcctacctctcatctcttgcctctatctcaggcccaccctaaacttgcagcatcactcaaggccattgtgtgtatcccattttaatctgagggaggacaggattgcaaacactttaatattagcattcccatatttataagttcctggtcaggtgtaatggcatatacctgaaatcccagtactttgagaggctgaagtgggaggatcacttgagcccaggagtttgagaccagcctaagcaacatagtaagacattgtctctataaaaattataatagtaaattagccaggcatggtgatatgcacctgtagtcccagttacgcaggaagctgaggatggagaatcacttgagcctgggaggtcaaggctgtagtgagctatgatcgtgccattggacttcagcctgggcaacagaacaagactgtgtcttaagaaaataaaaatgaaaaagttcctcactgttctaagacatcagggattattcactggcatttttccttgtatttttagagcgaggcttccttcatctccttttctccccctctccccaatcctttctcttttccttcttttctcccttaatgcaaactgattggtaactcctcattttcccctccgcacagtttctggcattcgccattctactccttggttttctgttcttgactgttttggatatattcatctttctatgtctcttgcactgtctgggactatgcacttcaacttgaaattccttgtcttttttgtcccaaagaatattgtgactttctctttatcctacactctcttttccatgtgtaacaaggggaggtgggagtatgatgccactcctctatgagatagaggtagaagttacatgtggaatatttacttccccttttatctgattttctcctcccacctcccttcactgatagtaagatagaggctgagagaccaagaaaaatagtgagagagatgaggcttgctcgatgaatattttggaaaactccagttgagtgaaaatgtatggaaatgggcggggcgtggcggctcacacctgtaatcccagtgcttagggaggctgaggcaggcagatcacttgatgtcaggagttcaagaccagtctggccaacatggtgaaacctcatttctactaaaaatacaaaaattagctgggtgtggtggtgctctcctgtaatcccagctactcgggaggctaaggcaggagaatggcttgaacccaggaggtggaggttgaagtgagatcatgccattgcactccagcctgggtgatagagtgagactctgtctcaggaaaaaaaaaaaaagaaaaagaaaaaaaagaaaacttacggaaataaacatgaacctttcagtagaatgttcctatccaccctgttttcacttctacaatctgtgtttacaaaatacgatacattttagaaaccaaaattccatgccttcttggtcattaataacattgacgtaaacttggtccaccatctgcagtctttggtgatgggcagaaagaaaacgaagtccctgagtctttgaaaagggcaaaagtgagtgcagggactgcagtgattatctgtatgaggtgaattgaaaccttaccactgagagaactgtgtgtagtaattactgaggagccaattgtgctctgcttaacgcatccaaagcaaggcagctattagtggtgtccccacttcggtgtttatgctagaatacaggaggacagcctggttttctcatacgatttgatctacgacatgatgagcctatggccgatgttgtgttctgaacacaggtgtggcttgcccacccagaggcgagtaggatgtttagttttacttagactgacactaggaactcagtaaaatgttaagcaggtttagggaagtgcttacctgatagtctaatttagaaacataatcttgtacacacagtaatatttattattggagtaagtcagtagaaacagactcataacctttctagggagacccagtaggtaaagtggatttaccagacagtaacatcttagtcttttgtgtttgtatggcaagtatctaagttaataatgggaagtaggtgaaagttttcaggttgtgtaccatgcaattggtttgactttgccttgccaagtaagcctaacataccccttataaatacactacatgcatttttagcaattagaatatttacttactgaaatatatatatacatatatgtattatatttccttattaatatatataatatgcgtgtgtgcatatatatatgcacacacacacacatatattttagaaagacacttgcaagctctcaaaaatgagttgctgcaataccattccctctgccaatcatatgggttaaggctgattttattgccagtcatatcgtactcaagttgaagtgctaagaatgctgtcttatccctcagctagattagttttaaaaggtgatcctgaagtcctgacaagcacagagtgaggatttacgaagtgacaaacagatgccgacgacatttactgtgagatttctcatagctgaattcccagtcctggccaaggagaaatatgcaacaggggagagtgaaaggggcattttaagttgggatttataaacaatcaattctcttcttatcagaaaaaaaaaatggagaggctggagaaaccgtcttaacttgaaacagtagtttattgcttcttacagcatggtctgtttctgttctgtgtggtagtcccacttacagtgcacagagcttcatggccttttgcagccaatttagccccttgcagctcagtgcaatgccatgcttcatcctggcaacttcaagggctttatggaaataccctacagatgtgtaggtgcttttgtacagttggtaactgaggcttcaaatcaccccatccatcttcatggcatttcttagctgatcagcaagaggtgtacgctgtattttcttttatagcatcttcattacctttgtgtcttccgtagctgctcatttttatgtatatggcatcattggccgggcgttatgggggttcctctggtcacgttccggcccttcattctgctagcttcaggttggtgagtcatgcatgtttctgaccagatggaacatgatttttcttatttctccactgtcccttccaagaatctttatttctctctccgttaggttcacatgaatggtagagagaggaactcaacagcacaaaatagtcaaaacataacattttattaaaaccacatccagtgcaacccccggactggcccctagcacagtgcctgctacataatagatgatccagtgaatattgacagaatgaagacgtgattggattaacgactgatcttgccacaaaaaataatgacatggaaactatgacagcaaaacagtgctccttgctgagaacagtctctgcaacctaaagaaggatggagcggaagaaatgttttatctttgtttaaaagaatgcaacaactgtggagctacctagggttctctgtaaggcagttgcctccaacacagccagggttaatttgcctgttgcacccagttcatgtagcttctcctagaatgtgcagcaatagaacgagcaggccaccatctatcaccagagaatatcttacctttattcaggagagagagctaaggagaagataaatggtgacagtgagagttgaactccacagggtgcatcctctccttcctctcaatcttagtcctggggaagcttctcagttacctttattgtgagcctcctgtaagtggggtttcttttttccatcactcactgaaaccggcgcatggtatcttctctggaaaactaggactttaggcaacatcaatcctgcaacagggaagcaagagcaactttggtggttacaggaaaagctggagatggctgtttatgtatccctggagtttggtttttggaggcaggtatcttacttgggctgaggtatgaaactgtagccaattatgtcaccatctataatcggccagattgtccctccaccaattcatatgttgaaatcctggctccctttgcctcacaatgtgactgtatttggagacagtttgtcttagttcacttgtgtttcagtaagggagtagctaacgctggggaatttataaagaaaagaggggtgttttggcttatggttctgcaggctgtgtaagaagcaggcaccagcatctgcttccggtgaggacttcatgctgcttccactcgtggcagaaagagaaagggagctggtatgtgcagagatacatagtgggaggggaagcaagagatagtggggaggagccaggctctttttcacaacctgttctctgctgggtgcagtggctcatacctgtaaccccagcaatttgggaggctgtggtgggaagtttgcttcagggtaagagtttcagagcaacctgggcaacatagcaagaccgtatctcaacaaaaaattaaaaagattagctgggcatgatggcatatacctgtagtcccaactaatagagaggctgaagcaagaagattatttgagtccaggtatttgaggctacagtgagctgtgattgcagcacttgcaatccagcctgggtgaagagtgagattctgtgtctgtaagcaaacagataaacagacaaaaagcccaccagttctcctaaggactaagagagcaagaattcactcaccctctattcccttcctggcgggcattaatctattcatgagggacccatctactcttcacttcatcttccctctatgcatgtctgtgtccaaaatttccttttcagctgggcacagtggcttatgcccataatcccagcactttgggaggccgaggtggtcagatcacctgaggtcaggagttcaagagcagcctggccaacgtggtgaaactctgtctctaccaaaaatacaaaataataataataataataataataataataataataataataattgcagggtgtggcagtgcatgcatgtaatgccagctacttgggagactgaggcaggagaatcacttgaacccaagaggcagaggttgcagtgagctgatatcgtgccattgcattccagcgtaggcgacaagagcgaaactctgtttcaaataaataaataaataacaagatctccttttcttataaggacaccagttagattagattagagcccaccctagtgacctcattttaacttacttacctttttaaaagcccctgctatcatttggataataacctcaaggcctttgcacttgcagttggctcctgccagcttattacatggctggctcttgcccttccttctgctctcagtgcaaacattacctcctcaaagaggccaaccctcaccttctcatcaaaaatggctcctcttacccattgtaaccactctattaaatttttcctttttgagcacttaagtcgcatttaaaaaaatttttaatccgtatttggtttgctggttccctatatgcctcccttcactgagtgtaacctttgtgggggcaggagtcttgtctgagtcatcattgcccaggggcgttctgttgtgttcagccaaatgttgaatgaatggatgatgcaatagatgaatgagacaagagtctctccagggaagctgaagtggcacacacactctcaaggtcttgaaaatgcctgacccctagtgcaggggttccatgatgcaccatagagttgatggtaggcaggcaaaatgaaagcttttaagccccattgattcacctgtgcttattaaactgccttgcctctaaaaatgatcattctccagtgaaaaccagggatagcgacgctcagtgcagatttcccaaaggaagaaaatccaatgaagtgcatctttgcagtgtgtgcattgcttgtcaacctgccctgcaattgtgtgtattcaataagggtgataatgatgatgacaatgattttatcagtcaagatcccacacaagaaacacaaccaataggatacttctataggttaagagatttattgcaagggagtacttataggattgcgaggctgactaagcaattcagaaatccatgggccaggccatcaggaagagtatgttggcaactcttgggcaggagctgacagcgtggaccacactgtggtcctcaaggatcacatggaccacggtgtggtccttcctcacagttttgctcttaaggcctttttccaattgcactacactcaccaagatttcttaagacaatctactttacttaaagacaatcaatgttaggtgttattcatatctataaaatgccttcacagcaatacctaaattaacattttatggaataaacggatactgtattctaaccaggttgacacttaagactgaccgtcatactgatgctaatgttgatgatgatgacaactgctactctgtattttgctcttagtaggtgtcaggcatgctgttaaagttcttacatgtgttttctaatttacaacattgttgctccaattatcattctcatagtatcaataagggggttcagggaggttaaatgacatgtccaaggtcacacagggctgaaaagtacatctgtgtgtgagcaagtctagagatccaatgtacagtatgatgactctaagaaataataatgtattgaatactggtaatttgccaaaagggtagattctaggtactctcactataaaagaaaaaaaaatttcaagaatataaaaatagaaaggagggaagaaaggaaactaattttatgagatgatgagtgtgttaaattgcttgactacataatcacttcactctgtatgtggaagtcaagataagtatgtcaaagtattatgttgtataccttagatacatacacttaaaaaaaaaaaaaaaaggactctgggccgggtgctgtggctcacacctgtaatcccagcactttgggaggccgaggtggggggatcatgaggtcaggagatcaagactgtcctggctaacacagttaaaccccgtctctactaaaaacacaaagaaattagccaggtgtggtggtgggcccctgtagtcccagcttctcgggaggctgaggcaggagaatggtgtgaacctgggaggcggagcttgcagtgagccgagattgcaccactgcgccccagcctgggcgacagagtgagactgcctctcaaaaaaaaaaaaaaaaaaaaattggactctggtttctaaatttaaacgtttatccagtgggctggtagctgtcatagggatagaaattctaggctctaggactctatcactagtaaatacagggaattaaaaactccaaggagtatttttcatgtaaagcaaacaaacaaaaaaggccttgagtcttaaaagagagagaaagagttgttgaaatctagaggcacacctagtaagcaagggtaatgtattgcatttccaggagaaaatgaacaagaatgtaagttacactgattcctgccctggggtaatgggtgggtttccttttcagctctcgtgccaggtgggcattcgcctgaactaggaggactcggggggattcaagccccctgtctctaggttgctatgagctttcacatcttcctctggtttatcccccgcccttagcacgaggtggttgcagcgtttcctaatataaatgcaagcaaaataaaattagaaatgtgctggtcgggggaagccagctacccacaggcgccgtaaattgccttttcctctcacccctactccctcctacccaccccttctcactcccatcaagccaccccaaataacctgccttgcctggctgagtcacggtttctggaaaagtggggccaagaaggttcctaacaagtcactggagtgatgattagtggatgatcagcggtcaaaagagaatcatgcatggaaggaaggtggataggattcattggcatgagtggcagatccgggaggactgcttggggcagactgtttgagtgacataggtcttttagggtcaagggagagaaaccagagaatgagggaagcacaagctactaaattttgccatcacagcagctgcctttgtgtacagtccctttgcctctgctgttccaatattgggatggttccctaccctcaggaaagtattcgcttgcctgtagccgcgttgaccctagcgcttgatgactgaggaacacttgtgttattagcaacccctctttcccactattttaaatgaataggcatacttgtatccatgcagatgctgctttagagtttagggaattacaaaatcaggtacaccctagagtggggtttctcaacagcaccagaataatgggatcagtcctgggcacgaacatttttccaagcagagtagtctcacatcccttgaaggctgagaactctcatataaaggcattccacaagttgttttagaaaaaaaacgagaaaatagcctcaatatttgaggagtgtagttattaggaataacttacgctacatgaggacaaatacctaaagcatgtgggccttaaaacctagatgacaggttgataggtgcagcaaaccaccatggcacatgtatacctatgtaacaaacctgcatgttctgcacatgtatcccagaacttagagtaaaatcaaaaaataaaaagaataacttaggctacaatgatgatgtcggtgctggtgttgatgaaggcaatagtggttacatgtaacctagtatctagctcttaccgtgccactcatattttgagaataattctatggaacacttgacttgatccttccagtcatcttgtaaggcaaatatgattgtgcctacccttgcttttatagatgagcagaagtaaatgaaagccagagattggaataggttgccaagactttactgctaataggggttgagaatggagggacataggttatccagaccctgaagcccgaactccctaaccacctcaaaacactgtcaggatcaggagaaatgcagattacacggaacaatatctggggcagaaaaacaatgaggcatcagtttttccccctttatcagtggttccccattctggctgcaacacattcgctgaggttgccttaaaaaatcacgttgcatggatccaagcccaaaccaattaaagataattttaggaatacgggactcagtgatcagtatttctttaagttcccagtgtaataggcagccagagttgagaaccattgcctgacattaaagattcacaaaatgtggtccatgaatcagactttaatagatctgttccaagttttcatgaatgagtatttagtaaagatgtggtgcatggcttttcctaattctcaaagggatcctctaatgccaaaaaaaaaaacacaaacaaggtgggaaatcattcccttggagtatgatgggagcttaccgtgtgcctggaactgaagtggatcttgagatgagctatctcatttaataatcctaacagccctgatattgtcccattttatactcaagggaccgaggttccagaaggctagggaatatgcttgatatgtcatcatgaataacggatagagccataaaccaactcaaatctacttaatgtcaaagccagttattcttaatagacttctctgatggatgagggttgaaaaagtcctgcccagcaatagggggaacgactcaaagacagctagagggctttgccagccagagggcatgcaggaactctgaagtggtgggttgttaagaactaaaatattccatttgcaccgcagagctcagaattaatttccactgtcctgatggagcaggtgggaaggaatttgacctctcccctttgcctagaaactggtcctttctggaagcttctgagcttgctatggaaaaaaaaaaaatttttccacttctttcccctgctaccttattttcttgttctctgaccatttatctcaaacaaggaattattatctttctaatgaagccacagtagacccttcatttatcctaggatatgtcacccctacaattttctgtgaagtgtttttttctcaaaagacttctgaaattgaatttcttacgcatatgggaggagaatgatctttatgatgacacgatgatcttatccagcaaatatatttccctgtagatccctactttagcagatggcatgatcggggtgctcaagctaaacacttctttgtcctccttaattcctctctcatgggcagactgctcccttcctattctaaatcaccgtgtcttgccatgcctctccgatccatccactgcctccatctccatcatctctctggtccaaacctcatccgtctctcagacaggaaaccgctgtggtttctgcttggtcaccccactagctgtgctcctacctcatcgtctgcagccagagtaataacttttagtacaaatctgatcatgtctgagctacttaaaactcttctgtggctgctctgagccctgcacataaaatccagaacccttcacacaggctaccgtatactgcgcgatctttctttttgctctccagcctaatttttctccatggtttccttcactgtctcaatctcacccctgcaaaatgaagtagacacatgttcctcacatttaatgtctgcatatatgagattagaaatgggatagtctgggtgtctgtctcacagtgaaagagttttgtttattctttttattttattttactttaagttctcggacacatgtactgaatgtgcaggtttgttacataggtgtccacgtgccatggtggtttgctgcacctatcaacccatcatctaggttttaagccccacatgcattagctatttgtcctaatgctctccctctccttgtctccaccccccgcggacaggccctggtgtgtgatgttcgcctccctacgtccatgtgttctcattgttcaactcccacttatgagtgagaacatgtggtgtttggttttctgttcctgtgttagtttgctgaggatgatggttcagcttcatccgtgtctccaagtgtaaattagttcaaccactgtggaagaaagtgtggcaattcctgaaggatctagaaccagaaataccatttgacccagccatcccattactgggtatatactcaaagtattataaatcattcttctataaagacacctgcacatgtatgtttattgcagcagtaattacaatagcaaagacttggaaccaacccaaatgtccatcaatgatagactggataaggaaaatgtagcacatatacaccatggaattttgtttattctttaaagagctttatgagatacgatttacacagtgcaaaattcacccattttaagtgtacagttcaatgttttgtaagtacatttactgagttgtacagccatgaccacattctaaatttacaccatctttataaccctcaaaagatcctcgggcagattagcatttcttcccccagttccccaatgctaggccaccactaatctattttctatctctaagaattggcctattctggatttttttttttttttttgagacggagtcttgctctgttgtccaggcgggagtgcagtggcgtgatctcggctcactgcaagctctgcctctcgggttcacgccattctcctgcctcagcctcccgattagctgggactacaggcgtctgccacggcacccggctaatttttgtatttttagtagacatggggtttcaccgtgttagccaggatggtctcgatttcctgaccttgtgatccgcacgcctcggcctcccaaagtgctgagattacaggcgtgagccaccgcgcccagcctggatgttttatatcactggaatcatacagtatttgttcttttgtatttgccttctttcacttagcataatgcttacggggttcatccatgttatagatgcgttgccagacaacatactgttgtgtggatataccatgttgtatttacctctttactagttggtagataattgggttgtttccacttattggctattgtgaatcatgccactatctgcatattagttaagaacatcggaaagtccaggttctctcattgaccatgagcagaaatccagctagtcttttgacttgtctaagccactgtttttttcttccgtaaaatgggaataataatggcatctaccctagaccgggcgcagtggctcatgcctgtaatcccagcactttgggaggctgagggaggaggattgcttgagaccgaaagttctagaccagtctgggagtcagagtgagaccttgtcgctaaaaatttttaaatagcgtctacttcatgggttattgtaaaacttaaatataatgataggagtaaagggtgtagcacagaattgcttgaacctgggaggtagaggttgcagtgagcccagatcgtaccgctgtactccagcctgggcaacagagtgagactccgtcaaaataaaataaaaattaaaaaacccacaaacaaaccgagacaatgagtgtagcacagcacatagaatgtaattagcactccagaagcctgagctattgttataattcctcttttcattacagaaaaattcttagggtagcagttcctggtagttactgttttttcacaaatatgtatttactttttaccaagttctagtcatttattcattcttttcaatcatcctgtgttgtaatcattactttcccattttatacccaaggaaacaaagtcagagtattcaggaatgcacccagggcacattggtaaggaaaagtacagcaggattttccttccttcctccctccctcccttccctccctccctccctccctccctccctccctccctccctccctctctctccctctcctttccctctcctcccctgtttccctttccttcccttccctttcctttcctttctttttgacagtcttgctctgtcgctcagggtggagtgcagtggcacaatctcagctcactgcaacctccgccttccggattgaagagattctcctcccacagcaggagtagctgggactacaggtgcgttccaccacagctggctaattatctttttttttcttattcttcttttttttttttttttttagtagagatggagttttgccaagttggctaggctagtgttgaactcctgaccttaggtgatgtccaccttggcctcccaaagtgctgggattacaggcatgaaccaccacgtccagccaggaaaactacagcaggatttatgagcgaaagcaaccagtgaatatttggaagctttgttcctggtgttcgggagtctgctgtcctctgacctcttgacttccaacccctcgtccatcactctttatcttatccctcaaaaaaggcatgacaaagggtcatgagaggcctggttctgagaatataatcaattacttggcttgaaaaggaaaaaaaaatgtcagtgtttatttgtttttaatcatagggggaaggatttttttggtgaagagtcaccattcaatttcttctgagaaaaagctttatttacatcagtaaagattgcaaggagacatcagaaagaacatttttatagtgaaggttttgagatcctagggagttcatctgaaagacttacagcattgtcactactcactgcatgtgtgtgggcatgtgtgtacacgcgtgtgtgcatgtgtgtgcatgcgtatgtgtgtgcatgtgtgtgtgtgagtgtaggtgtgtgcgtgcatgtgtgtgtgtgtgcacatgtgtacctgtgtctgcgtgtgtgcatgtgcatgtgtgcacgtgcatgtgtgtttgtacgtgtgtggggtgtgtgcgcgcgtgtgcgtgcatttgcatgcgtgtgcgtgtgtgtgtgtgcgtctgtgtgtgtgtgtgtgtgcccctgagtagagctccctctgcagaagtcaggctgaatcatcccaccttgctgactctttctaaccctatgatcctttgcctgagtaggtggggagtgagtttaaaccttatgtcttattttccttcattaatttggccaaatcatctgaaaatcactattctctacctctcaaagatgtagatggtggtactaatttaaaaattgctataatactctaagccatcatcagtatattgttttctggttttcaccttcttcagtatgcttcctatgagacagagttagaagtggaaagaggtgaagatagagatggtgaaagagggtgagagatttaaagccatattcgatcccagtgagagagctcatacagaagaggcatagttgagagagaaaatagcaaaacagtaactaggtgtcactcttttaccagcattcacagtaattgagctgagaaagaggtaaaaagtttttttgagtgattttgttaaccagaagacgtgatttgacttagggtttgtgggggtttgctgtgtgtgtgtgtgtgtgtgtgtgtgtgtgtgtgtgtgtgtgtgtgtgtgtgtccttttgttcctaactggctgtgagactttggtaagtcatcttaaagtgttttttttttttaaagtagttttcagcagagattgccttttattttttctcttctactgcacgatgcaatcaggaacctgtctagaagtatcagaagttgctgctacattttggtggacttgcacctgactcacccctccagcctcgatgcatcgcatgcagttagcatgttcagcacaatcttctctcttgggtttgggcaggcatatggtctgtgcctagcagagctgatattgctggttccaaaaaactgcctgttacatgctggtggtcacaagagaagaagaggtgagaagggctcggagccagacaaagcacgcctttgtaaatgaatgtggagttggccaccagcagtcttcattatccccgtcattgcaggcagctgagctggctttgtgtcagccctgctcggagtagccttgttaattcacccccatgaaaatggaagtttcatacacattgacataattaatgaagaggcaggcagcatgctctaccaattaacaccacagggaaaagtaaaatgggctttcttttggcatattgtgccaaagttaaggactgtaagacacagcaaataaatagagatgcttttaatgagctgcaagatcgagctgaataagtcagaaaggagtgttgggtaaacactgccaactctttgcaccgttaagagtaattgatgagcatagttgaaagtttggggggaaagagaaccgtcggctgctccaaccgtgttcatttataaatgcatctttccctgaaagctactgttaggtgtgtttaagggtgtaatgtgcaagaggaaacaaatatgacagacttgctattttgtagtgcccagaaaatatgaggcatagctgttgtagaaagaacaagcgtggcggatttttcacacttgatgggattgtttttgtcaaactcggagtaaaactggctcctctgccgtatagatccctgctctgagtacaccctggaaacaggaagcagggaatctttaagagtggtattggaatgactccattccttttagaaaagccagacggataatttaatttttgttctctatgtttgtgatatgaaagcatgaccttccaccaaaggatttcccattgtttctgagagtgagtgtatttatataaagaagttttctaaccaaagagaaatctgttggatcaaaaaatagaatgatcagtagggtttagtagctatttaggaaattttctgaattcaaaccaattgaatctgagttcagttggtttttgttaatgtggtgtatcttgttcgattaagccttcattttaaaattaaaggtgtcttaaatggagttgcattgtttgaccttagagagatcaattgtgtgtatcagaccaaacaaaattcaccatattcaacaattgtcctagcacccatctcccctccccactcccgacaaccatcatgacaaaagtgcaggaggaaaattcttgacattagcagacagcatgctctgaagcaagtaagagaaggataattcaatatagtactcgtcagtgggcgtctggtcctgcccatttttcctggctctgacatttcatcatgctgagtgagattccatttctaaacttggtgtcattcatgcaacatggccccaagtataggacaactacttaatctgttgttgctcaaagaaggtgcaatgcattacaatgctagagagaaaagtgttcataggaacctaaagagacagtgtgttgacaccaacatgggacctccctaagcaagttgctgagatttgattatgtgtgatttctgccttatgtgcccactttggatgtaaccctgatgtcaggtgtggctcttggaaacgacactattttctgttgtgcaggtatcattgctgcatcttcctctggttgaggacttgttacctggacttttgaattatcttctttgtacatggggggatggcagtatttctctgattgtgatctgtgaacttgccacaggatcatcttggatcctggctgagtgtggaatttccaggcccacatctgacctatcagggctggccgtacaatcagcattttaaataggcatcttggtatttccatgggattctcttgatctctatccacccttaacatcccatcctactttctgcttgttaagactcaggatacttctgggactgctctatggaatgggttcttaggaattctaaatgcatttgcatttcaaagactgatgagaaagggacacctgtccaggtaagacaagtcatcggtttccaactccagcaataagaacttagtttatcagatgtactgtctaactagtagaggtgtgttcgctgtcttcattaaaatgaagccaggttgatgtgactaaattttgatttgatttgctgcgttttatgtggtggcttatacttgaatgtctctataatatctccctgtgtattttagagagtgtgaattaaaacagctgccttgtacattgtaagtgttcaaaaatagtttgtaaagtgttagaataagggcttcatagccacaaggagggtctcagaaggtgatttggctagattataaaacacaaatattaacttttgacttgtttattctttatttttatttgattatttatttatttatttatttttttatttatttatttatgagacagagttttgctctgtcgtccaggatagagtgcagtggcccaatcttggctcactgcaacctctccctcccaggttcaggcgattctcctgcctcagcttccagagtagctgggattacaggtgcgtgccatcacacctagctaatttttgtatttttagtagagaaggggtcgcaccatgttggccagggtagtcttgaactcctgacctcaggtgatccaccaaccttggcctcccaaagtactgggattacaggcgtgagccactgcacctgccgttgacttatttatttgtaaattatcctgttctccacatatatacttttaaaaagcacttcaaaatttcagtgtggttattcaatggccatcaaagtttgttattctaccagaatggtcttatcttttacaagcgagatctaagaaagcacatacagaggcctgaaaagttgatttccctccttggaggagttcctgatttaacttcataaatccacaagagctgacatctcttcatgtccaaccacaaaatgggtagaaaatgatgaaatgcagaagaggcttctaagtcttggtctgcttctgtgatagaacaggagagaggcagcattttatttttaccattattagccagcctgtcagtcacttaaaatttttccgtgaagacacaaagctaagttttgaatactctgtgtcactgcttccagctgatattataaaaggcagtggtgaggatttcagctaaaaaaagattcgttgtttcaaaagcccagcctgaagtaagacagtgccatagacacgaccacaccagagggcaggtggttcacaaagggccttgcattcttctttgctcttgtttactttacatgagggcaaggagtctcagaagcgtaagatataatactacactagacaggcaagcagacctaatgtgcaaagtctcatgttggctatataggtagtttatatgtcagttccaattatgaatacattcctcagcaactagagttttctcattcattcttactgaactgttagggcatgtggcagcccagagctctgtcaaaatgaattgtcccccttgaaaagttggcaatgcaaggaagtgacaacctaatgcatgttagcactcttgataacaggacccagaggagacggcgaagcaacaattggatatgtgtctgggcactggctgttgttcctgcctgggttcaaatctcctctctgccgcttatgatctgtgtgcatttacaagtttgttagcccccttacctctttgttccttataaggttgtcgtgcaaattacatgaaatgatgttacaggtgtaagccaatgcctgacacacatatgtattctacagtaatcattatcaaagtggtaagcaggaaccagtgccatttcacaactatcaggtactcttctgggtactcatcatgaaagactgcagtgttccatttacaggcattggttggtggtttactaaagagtgtgtttttgtccaagaagttcactcactacattttgctcaaccagtcctctcatttgcagcgatttttttttctttgagcgtcccttgttgtgcagcataaacatctgggctgcatggtcagacccatgaggcttctcttccatctggccacctgttatataattaagcctgattgcagatgcgattctcatttagctgtcagcagcagcctgggagactagcaactgaggtgaataaaggtagctcaccacatctacaagggtagaagggctgaagcgaagggttgaccagccaggacaacaaaggttattgcttatggcagtgtcagcctaagagctcaagttcaagatcagaagcatgagagggtaagacctctaggggagtctgcataggtccaggtgaaaccctgggtgtctcttgattgtcagagcatgtaaatgatttttccgtgaggatagaatttgacagtcagtgctagaaagggcttcagagtttggtaagtctctttggtggactgcatggatagatgtgaaaagataaaccaaatcaaaatgtatattccattgaatcatgacaaattcgcattggtaatgcgaatgatagaatattataggttatgcttaagtgctttacctgtggaagttacttatcagaactccaaattttcaggggcatttgcacagccagtaattgtgcaggagatccaactcacatccacctcagcttaactgcctcttgatgctttcaagcattatgctatttatttcagtgtcttatgtttcagaactaaagaaatgttgaattaaattccccactatatgccgtcagtgtttcagaaaaaaaaaaaaaaaaaaagaaaaagaaatgagcaaggcaggtggatttctggcaaagttttgttttcatttctgtctgatagaaatgggagcacttcctaaaccaaaagagcattttttttttggtagaaatagccatttattaaaaaccataaatctgttatggctggttggtgagcataccttacagtttaattgtaccaagttgaaagtggacacataccaggataggcacacctcattgttccacatgtggcttcagtgctttaatgtgaattataagtacataagtaaagtacatattatttatgcatatgttgtatttatgacctttgggatgcatcagaggttgcttaggctcgttgttctgggtctttcaggatctagattttctatcctgattcttcctttttctaaaaaaaaaaaaaaaaaaaaaaaaaaaaaggctcagttgaggaactcactcagctcactcagtgcaatactataatgggaagagttccatgatgctgccattccagttataaaatggcttcttttagtcatcgtacaagccagcagttatggacagtgtttctctaaatgttagtaataaagtgtagcaggtttcatatcagtatactaattctaccaaaagccattttcagtcccattgacatttgaattctgcccatgcaaattagtggaacttgccatcacccttggcctataatgccccataccaagcatcaccagcccagtgcttctcagtcttggctgcaaatgatcgagctataaaaatactgctacctgggacctgcccctcagtgcctctgatttaactagtaaaatcagagggaggtttgagcatcaggatttctaaactttcagattttcagttgggcgtgtagtggggtgggttagggggaggtaatgtctccaaatggaaatgtctttttggttaaaataaagtagaaagaccaaataagtgatatttggggagagcaatgaatattctaaaaccaatcaatgggaattgtcattttatggttctcctgaatgtgagtgtccaaagtcctcgttattcaaagtgtggtccaaagaccagcctcacttggtaactgttagaaatgcagactgttatgttccagacacacctactggatcagaatgtgcactttaccacgacttccaggtgatttcatgtactttgagttagagaagcactgtcctagtcacagtgatgaggagggtgataagagtggcagaattcactttattgagcctctgctatgtgtcaagcactatgctaagacatttttgtgacatacttctccttaagttgttgccggagttaaataaagtgatatgtttaaaacactaagtgtagtatccaatatcaggtgttccaaaaagggcttatcatcatcatcatcacggtcattgtcattatcttaaatccatggtcaccctaggacaggaagcatgaatctagtttgtaagtgcacgtgatctcctttccatgggtgatatgggttggctgtgtccccacccaaatctcatcttgaattgtagctcccataattcctacgtgttgtgggagggacttgatgggagatagccgaatcatgggggctgttttccccatactgtcctcatggtagtaagtttcatgagatctgatggttttgtaaggggtttccctctacggttggttctcattctctcttgtctgccaccacatcagatgcacctttcaccttccaccatgattgtgaggcctccccagccacgtataactgtaagtccattaaatctatttttctttataaattaccagtctcaagtatgtctttattgcatcatgaaagtagactaatacagtgggccatgtgagatgatgagattgtgaccttacattcaaagataactaagctgtggtggcaatggatgatttgttctcctgaaatctttaggtggcacgggacagaaatccaaatagaattggcgtttgtcaaaagtagaatatattgtactttaaaaatgtgaatgtcagacatttgggggtggggggaggggggagggatagcattaggagatatacctaatgtaaatgacgagttaatgggtgcagcacaccaacatggcatatgtatacatatgtaacaaacctgcatattgtgcacatgtaccctagaacttaaagtataataaatatatatatatataaatgtgaatgtcatgtttctgagatgggtgtcaggaatagctgaatcaaggtgaccaaatggcgatgctctaaggaatgggccttgctgaatctgtacactctgcttttcttggcgtccactttatttcatgtcatattctctccaaatagtggcaagatgctcaccctcaactcaggactgagatcctatcactttgtcttgaccaggagaaaaagagcacctcctttacaatcatgaaaggtaacatcccagggataactctcaggtaccctgtgcacatccctgagccagttactcaagtcagaagcatggatattctgatcaggcaggttggcttcaaggatgaatcaggcctctcatgaactacaagctacggagttctctgaaactggagaagaggttcttcttcaaagaagtgcagtgtgtaatgcccacctgaagagggaaggaatttccagcaggtgtaagggactaatgtccactacaggccctcagttaaaagagttgggtagaaagaggtggggtgtgtgtatgtgcagcctgcattgactctccacttgatgctgtgtacattctgagggcaaaaccctgaattttccttgggtctgccgtaacaaattctctcaatggtgcctccatagggagaaaggggccaacatctgggggttctttcctggaacagtgttaagtgctttcagagttaacaagttttatattcaaacaactccataagatgagtctttcagacttaatttctaaaaccgcaaaaagtactgtagaggagttcagagatacgtctaaagtcacagttaatcaagaggactggtaggattcccagctcacttcaaattcatactcctgtatattcctctttataaataagtcagtgagcaaattatctcattaaaatgtaagtcagagattgccaacttcaggctcacaggcaaatggactttataacttgcagatacagtgggggtattttcatctgtgtgtctatatgtatggatgtatttacaaaataacattttatgtaagaatatgaatttctggcttgtcttcatctctccaggataaaaaatggctaaagttgagttgtggttgtcctctccggcattgcacactttcttcatttcccccagcattcttacctggccagtttctgtcatttatagaacctgtttggtcctggagatatttgagtttgaaaatcctggagtaatagtaccccattatgtcactcatgtacatggtagcctatgcaatgtgtcattccattcttctttaactgttgcaaaacatgccatgtgctctatctgtatatctctctctgttctcactgtcacataccacacacaccccaccccacccccacacacacacacagcaagggaggaatttgcgtttgctttgctcttttctttccctgccccctctcacttagctcactgcataatcctcctctcgtaaccttcaactccacaatgcaggaattttgcatgctctgtccccaaccgtattaataaagcacttaaaagtatgcgattttattcagggttatttatctaactgtctctactgaagtggtacttctgcagctcttcagacgcagtggtttccctgggggcagctttcggagtccgaaagcattgactgaaatgcaaagcccggatgccagctgcacgcgcaagcattccaagcccagtcattgtagccactggagatgggggtgggggatttgagtggatgggtccttccagcgggcatttgggtcatttggcccgtcgccctgcctgcaggctggcctgcacgcagcacctggcctaggcaccctggaatctctcccttcctgtggcagacacaggaaactcctacctcatcacggcagctgcatgtgtgggtaagcccacggtgatgatgacttctgtactggctgtttttactccttgctttaatgatattagctcacgtggttatcctttcccttctagcaggatttttccacagccagacaattctttgcggtgaggaggccaccctgtgctctgtaggatgtttagcagtatctctggcctcaatccacaggataccagtagcacccacccaccaggttgtgatgacccgactttctcctgatactgcctgatatcctctgtgggtgaattttcctggttaagaatcactatcttacaggaaggtggcaaagatgagagtatcagactgtaagttccgcgagagcaggcattgtgtctggtttggtcgtggttgtgtgccaacagatagtagattttcaatacatatttgttgaatgaatgaatgaatgaatgaacttccgactgatcagagctgaggactatattcatcctcaaggtaatataatgattattattcacatattaggaggaaaatcaagggttcctttttatcttctcctactaccccccgctgtcattatcaagtgagttcaactaagatttgcttaatgaaaacctaaatcattatggctctcttaatcagagtacctactatgtggctattctaaataggtgttctcattgaacttggttttctcagtgattcataaagatggttaatagcaatgaaattttacagattgggaaactgaaaaccagagaagtgaaggaatttgtccatggccacacagccgtaagggagtagagacctgattcaaatcttgggctagaaggattctcagaatcttcttttctctttgcacctgattggctgtgcctctcgctttattcagtcaaagctcaattcaggacgacgtgaaagaacattaattccaaggtgaaatgtgcaagaggttaagtgaatttgaccaagtttcccattataatttattttgggggaaaatggattaaaaacataatctctcggttctaacttcacgttcacttgaaaatgaaaagtgagtgttttacagatccacagcttcacgttatctgttgcattttgagagagaagaagatggatgcattggggtagagagtataataatattacaaggctttatatggaaggtcaagtgaggggaagatgagctggaaggatggggaatagcaggctaagaaagaacaatgcataacagatgtatctaaactgtttttaaaaatggttaatagactcaaggagaaatataaagaagggagcactctgaaaggtcagaacaagtagtcaagtaagaagcaaagtaatttaaacataaaaaggaaaatccgcagatatttctttcatgcttcagaaagcgtcggccttaaacattgcagtgtcccagtgatgcattgcaatcttctgcaagacactgaagtattttatgaaggcatactttttcctcctaagttgaggagaccctgagatggcccaaatttcctttaaaaatgaaatgaaactgctcggctttccttacattaaccttaaagataatgaagttttggtccttgccctataaaggatagacagaaagggcctagtcacatcttcctgtcatctatgtagatgatgtccttattcagaagtcattatatgagaatatgagtgttatgggaaggcaggaaggaaggaagggaaaggaaaggagaggagagggaggaagggaaggagagagagaggaaggaagggagggaggggaaggagaaagggagagagaggaaggaaggaaggaaggagaagaaagatggagggagggaagggaaggaagggagagagagggaggaagggcaaaggaagtaagggagagagacgaaggaagaggggaaggaaggaagggagagagaggaagcaagggagggagggggaagaaggaagggagagagagggaggaagggagagagaggaaggaagggagagagagggaggaagggagagagaggaaggaagggagagagagggaggaagggagagagagggaggaagggagagagaggaaggaagggagagagagggaggaagggagagagagggaggaagggagagagagggaggaagggagagagagggaggaagggagagagagggaggaagggagagagagggaggaagggagagagagggaggaagggagagagagggaggaagaggggaaggaaggaagggagagagaggaaggaaaggagagagaggaaggaagggagggaggggaaggaaaggggagggaaagaaggaagggagagatggaaaggagggaaggaaggcctcctcatcctttttttctgcgttcgtttactcatttcacttttttttttaattggacatctgtatatgtcagtcactgtggaagacatttgggaaatgatgactagtaaaaacccaaacaaaataaacaaacagaaagtacctgccgtcgttgtctagtggacaaggcaaaacatcaataattcaataattactccgtgtgttggggcagggtctgttttcttgcagtcatgcctcagttttggcttaacatatcagcttccatagttaacttattcatctgcctgcctctaaatcccacagattttgagatgtagatcagctttgtcctctcaagggtttcacattcaggaaagggctgacccatcaggcatgatgaagcactgcttgacagattcagcctccccagtcaatgaaggaaaggaaaggaaagcaaggttcgtttcatttcccaatcacgtgatggcattgggcactaccactagcttctgatgcattcattctggaacttgtttgtgaaaatcagttgagatactaaatatagaaggggagagccacttggagttgaaagtgacctttaaggccacttctgtcaacttagcaccaaatgcatgaatttacacaactgaatttctgctcttcggacataaactttccccattcttttttggtcagtttgtttttaccctgcagagctgatactgcagagggcagctcattttattcctggactatagttcctcattttgtagaaatcaactttgtcttcccaaggttactggtgttaattttaccttctgatgttaggtaaccagtcactggtttccgaagctgggtctgagtcccagaattcacattgatcagccatggtacctgaacaagcacctctagccccctgagcatcagggatctttccattaagtggagagtatcctccagaatctacctctccagaattcagggtaagataagtatggttgtttggatcagataggttttgtctccatggtagacaagagaccactatagcttaaaactcccattctgccaacagaacaaccgaaagagctagaatacgcttgtttatgtgtttgttttctggtagctgggcaaagaaataagggagggcttggctggtttgtcttgtaccatgtgtttatccttaaaccaatcagaatgaatcaggaatcgactactatcgttcacgtgactaaactggagtattagagaatcagcagggttcatgatgagggagtatagctgtgttcactgcaacacagctcctaagagcaaacagtttaatcagctcatttatcatcctaaccaaacttttaaaaggcagttcctcgggaagttaagcatagaattaccatatgacccagcaaacccattcccagttagatgcctaaaggaaagaattgtaaacagattcacttgaatccacatacacaaatgcttataacatcaccattcattacagccaaaaagcaaagacaacccaaatgcctatcaataaatttatcaataaataaatggatgaacaaaatgtggtctatccatacaatgaaatatcattgagccataaaaaggaaggagctactgttacatgctacaacgtggatggacctcaaaaacactgtggtaagtaaaagaacccagaatcaaaagaccacagattatgtgatttccttcacctgaaatatctggagtaggtaaatccacaccaacagaaagcagattggtggttgctacaggctaggaggaaggggttggggaataaccattaaataggtacagattttgtttcggaatggaatgatgacgtattttggaactagataggggtggtggttgcataacatttgtgaatgaacaaaatgccactgaattgtttccttttttttttgagacagagtctcggtctgtcacccaggctagattgcagtggcacaatcggctcactgcaaattccacctcctaggttcaagcgattctcctgcttcagcctcctgagtagctgagactacaggtacataccaccaggcccaactaatttttgtatttttatgagagacggggtttcaccatgttggccaggctggtcatgaactcctgaaaactgtttactttaaatggttaacaaccaccacaacaaaaaccatggagaccaagggagaaaacttaagtgagatatataacttgcttgagctatgtgttcattttataaaatgggcaaaagatgcctatgtctttaggttataacaagcttcaaacaagtgaatatttataggggaccaggttcctggcaactattaggtgctcaataaatagcctgcatgcaaatacctccccacacacatatgcccacttgtacccacgtaattcttatttaatggtgttcttttaaagaatgagataacaggccaggcataagcggctcatgcctgtaatcccagcgctttgggaggccgaagcgggtggatcacctgaggttgggagttcgagaacagcctgaccaacatggagaaaccctgtctctactaaaaatgcaaaattagctgggtgtggtggtgcatgcctgtagtcccagctactgagaaggctgaggcaggagaattgcttgaacctgggagggggaggttgccgtgagctgagatcacgccattggtcattacactccagcctggacaacaagagtgaaacttcatctcttaattaaaaaaaaaaaaaaaaagaatgaggtaacagaaacaaagaacttacctagcacatgatgttagcaaaccctgtcaaatttgtattcccatatttctcaaaacttgttcttctttccctctccacaccggtgattgttgtcaccctgctttcctggactgctaaaataggctacatttcccttttcaatcccttttgcttgctcttgatgttcccaacagcggccaaagaacccatctcacaatgtacataggatgctttcccttcccagttaaaaaccccactgtacttagagttaatcccaaccaccttcatataaagccctggaagtctggctcctgccaaccttgctaaactcatcctttttttttttttttcctgattcttatcccattgactttgactgtttctaagctggctctatcccaagtgaaaagtcacctcttcaaagaccttttctatttaaaagaattatcccagctcttctatattcttttccatgacatgttattcacgtgcttccaagtcctgatcaccatttgtaattttaaacattgagttgcttttccttgctctttctcttattcatgaaggcagctctgctgttgaacacaatacatggtagacagcaggccgtcgatcagcacttgttaaatgagatcaatgtgtggaaattattattaaagtcctgaaaattttacaaagtctattttgctctaatgtgtacattggtggtatagtctggggaatacatgtatagtttgcattgtggacatccgattgtttccctggatgctgccctttcaacaagaaatgcgaccttagcaaaagatgggggccccatgaacttccaactcgtcttttatttatggtatatgtgtcagagaaacataacaacatttgggaatttattaaatggcagttttctcttcaaattcttgctctagtttattgtgcctaatggagtcttactaagggcaaagctaattgacaacaaggtttatttctgccgatcttagccaaaaagtcaatcaccactcaacgagagctactctgactctttggccaatggacaaatttccatcttgactggcttgactggtcctgggagaatagaagtgaatgagcttaattctattttgatacttttcattttcagcaaaactgagacaacatcaaggagttacattatcatgagaagagaggggttgcatggaaattatgtcacaagaatgcttggtcaattttcattgcattcagctctattcacaaaggcctgttttgctggcagacgcttttgtcagatatgtggctcacggcaggcaatcaagctgtggcatgttgcagagggacagtgagggctcacatgctggaggcagaggttactcaggccaggtaatgaataaccccactggaagagcaaaagagctcatttctcagtggtttatcttccagtgggttggtgttgtgtataatacagtgagttgagatgaggaatctatttggttttggttccacccctttgccagcaaaaccacaaagtgggaaaagctaacctttgggaggtaaaagctaacagtgcaagatgccatcaataaaataagctccctcatcagtgaagaagggggaaccaggctcaaagtttgtcttctaccaggaatataagcatcgtgtcctggatagtatgaagcatttaaccatgaagtcttctgttgcaaatgacatgtgtatacatatgtgtgtgtgtgtgtgtgtgtatatatatgtttgtatgtgcttgtgtatatgtgtgtgtttgtgtgtatgtatatatgtatacatattttatatatatatgtatatatatatgttatatatataagttgctttcaccaaatccttgtaaataccctgtgctgaacggagaagtcagaaatgggtaatagactacattcaaactcattttcaatttccaaaaatatgcaaggcaccccatttttggtacgtggatgttttttagcatttaatggataacaattttgtatgtcccataagaattattcacagacatctcccaattccattttcagagacttactgtagacttgcttttatgcctgtagcttggatccaagaaatttatttctacctctgcagtccaaaaaacggaatgtctaacgattttttgcaaggcaagtcgaagtgctatggtggaattcttcttagcaagacaagcttcagtggaaggaagaatgtaaaacagaaaaagttctttaagaggtatataaatctacacatcggtagtagtcacactaataataaacattcatttggcatcatatatttttaaagtgctttaaaatgttgacattccttagaaaggagagaatagctctgggatgaggatttttattttacatttcagggatgggttacacagaaagaaagccacttgttcattattgactaagtgtggcaaccagtgtgaccattccctagtggtatttttggctcttggcttagaacagggtatgtatccaggaggcaagagaatgagtaagtgacctactgtactgaaaagaacagacagagatgtagtcacaaaccagtttagatgagggacctttgtttgtaagatgtaaacatcgtaaacaaggagatgctggtagtttttgacattttatgggcccccgtagcttcatcgcttatgtacattgaatggatgtatgttgtgatggaaaggcagtggctgcgtttgccctttcaattgatgggcagccatatcttgggatgaattagccttttgtgggatgaatatgatgcctccctctgccatgacatcaagaatatcctctttgagggttggagagaagttgtctcttttttcctgccttgcaatttatatattaagggttgaccaaaaattgttaaaaatgtttaaagctaagtaatatcctgtgctagcctgaactaaaaaataatgccttattctgacaattccagtttttacagttgaaggctattaatcaatgaagcagtgtggatccatataaatattgatcactgtctccttgccctcctgtgaatgttctctcttaatgacagccaatttcaatattcattagaaagggtgcattttctggcttgcaccattgctgattagtaactagagagatttaactagaccatggtcattttgtataaatagttcctcagatcaaaaagatcctggttattgtctatctggacttagcttacctcttcaacatttcagaaattagagtgttttcttgtttgtgtcatatcctgctcacctaaacattgctactgttaagcattaatcttctcatatttaatatataaaaatcaaagtaaatattcaagagttatatttagatctgtaaagggaagcccaagtgctttgtatgaggtgcgaactagggttaataggatgtatttaacaccatattgtttcagctcaagttagggagagaaggagatcatgtatgcaaaaagtagaacatttctccccttcctattttgtctagaggggcgtaccctcttttaaggtattgtcacatgcacaacatctggccttcagttctcctctccgctgtcatgcaatctggcagaatctctttctgctccatggttcctaaatgcatccatcccattgccattaggattctacttttggcattttccccatctgttttggtaattactgtcagatgaactgatatctctaagttgaaaatggccaccttttaaggtagcacattgtagtcaacttcccaaatcatgaagtctatgtggcttttagtagttgtttgcagaagtaatttagtaactttactttttcttttttttttaatttctaagccactgcaagcacgcaccagccttcagtggcctgaattattcagcagtcattaaaaatgcagtcagtgataaggcagacagtccttgtgcctgggtttgtcaacatatcttgtcctcagcaaagactaggttcactggaagcacgcaggatttagttcaccttctctagaatggctgttgttgggaggatttctagcaacattactataaatgatctgcctgcctctgtgttgtggtttataaactctgtgtaactaggataagctggctttggaagaggcaagccgttctttcactagaagggagaggttattgcatcacccatcagcaagagaggaattcaggagaggtagagagctgtgtggggtttgggtggcagccagctactttccaaaacttcccaggggctgcaatacagccgccaacccaaatgtcattgggataggccagcgtgccagatgccatcacagaaaataacttcccttgcctggcatctgggttcttgccttgtaatccagaagaccacatgctggatcagctggtcccagcggggaccatgagctcttccgtcctctctccctccctgtctgctgagcatttgaatgagtcatcagagtgcagaatggattttggccatgcccttaattgagtgttctgtacatacaataataattaataataatttgaactgatccttctatagttttgtctctggaccaggcactgctctaaaggctgcacagattgtaactcatttacatatgtaacacatatctacatatctcattagcctgaagcacaatagaatgagaaaagtgaaaagcaaagtgcttagactctagatttggaccaactggcttcctatgtcaactctgcctctttcagtataggtgactttagaaagtaaattctgctttctcaagccaagcgtccatgcacagacaagggaataaacaaaacgtggtgtatactggaatattattcagccttagaaatgaaggagattctggccgactgtgtggtggctctagcctgcaatcccaacactttgggagggtgaggcggacagatcacttgaggtcaggggtttgagaccagcatggccaacgtggtgaaaactcaactactcaaaatagaaaaattagctggacatggtggcacacacctgtgaagccagctactcaggaggctgaagcatgagaattgcttgaaccctggagatggaggttacagtgagcccacgtcgcgtccctgcacgcaagcctaggcaagaaagcaagaccctgtctcaaaaaaagaaaagagatgctgatacatgctacaacatagatgaaccttgaggacattattctaagtgaaatgagcttgtcacaaaagaacaaatattgcatgattccacttatatgaggtgcccatagttgtcaaattcacaaagacaaaaagtggcatggtcgttaccaagggctgggagaaaagaggaatggtgagttagtgtttaattggtacagagtttcagttttgcaagatgaaaagagttctggagatgaatgttgggaatggctgtgcaacactgtgaatgtacttaacactactcaactgcagacttaaaatggtaaaaaaaaaataaataaataaaataaaaattaaaagaagaagtaaattctgctttctgcacatctgccagctgcccttgtctaagttcccaaaacagattctgctttttgcttccacagagcctttgcatggttgtttccccttcctgcaatatttacttagtactttttcctaggttactctcctcatctttccaaccttgggctacacacgcacctttaggaaagcctacttctgtgttcttcccatcttgtgtacgttccaaattctgaatctccaataaaatgaatatgcatttctttctctctttttttgtaacttttattttatcttcaggggtacaagtgcaggcttgttacataggtaaacttgtgtgtcatgggggtttgttgtgcagattatttcatcacccaggtgttaaacctagtacccattacttgtttctcccgatcctgtccctcccctgacctccacctgccaagagaccccagtgtgtgttgttcccctctatgtgtccacgtgtttttatcatttagctcccacttatacgtgagaacatgcagtgtttggttttatgttcctttgttagtttgctgagaatgagagcctccagtttcatccatgttcctgcaaaggacatgatcttgttcttttttatggctgcatagcaccccacagtatacatgtaccacactttctttatccagtctatcattgatgggcatttaggttgattccacatccttgctattgtgaatagtgctgcattgaatatacacatgcatgtctttttattatcattttctcctttgcctttcctaaaccatgcagtttgatatatgatgaggctacttctaccattgatgtaggtactgtgggtgccaggatgcccaggaaaaggtggaatcagccagtaatcccagcaatttaggaggccaaggagggtagatcatttgaggtcaggagtttgagaccagcctggacaacatggtgaaatcccatgtctactaaaagtacaaaaattagccaggcgtggtggtgcatgcctgtaatcccagttacttgggagtctaaggcaccagaattgcttaaacctgggagctggaggtttcagtgagcctagatcgtgccactgcactccagcctgggcaacagagcaagactgtctaaaaaataaataaataaataaaaattggaatcggctgggatgatacctcaacaagtgaaattgtcctgtcaagaccatttgcatgtgtgaaagaataaaagaaaaacagaaaacactgagcttctctgaggctttattgccccctgataagaccgtgagaactcatttgtcttatattagatgattattttactcttctgggtctttgatctaggcagttagctggttagaatttgctgatgttgtattcatgtttctttgaatcagcagtaactcacttagggatgaaaatggggcatttggcttataagaagaaaacaaatatcatttatattcatttttctacttgaaactactacttgaaaactgggcccatagagttcgttgtgctaaaaggaacatttctcattggtagttagtatttcaattgtaatcaaattccaaaacttcctacctgttgaaactataagatgatggtgacgattatttgagactgagcctagctctgtcgcccaggctggagtgcaatgctgcaatgtctgctcactagaacatttgtctcctgagttcaagcgattctcctgcctcagactcttgagtagctgggattacgggcacccgccaccacgcctggctaatttttgtattttcagtagcgaaagggtttcaccatgttggccaagctggtcttgaactcctgacctcaggtgatcctcccgcctcggcctcccaaactgctgggattacaggtatgagccgatgcatcctgccgaatctataagatttaaggataataataatgaatgtttacggagcagtgttcatcaggtagtgttctaagtactttacatatattaatgatcttcactatgttatacttgtatatcaccatctgtgatcatctgaagcccttacagtttaagggaaaatctgcatttgatacatatagtgtgtgttaaagaaacatgttaaagatgaaggaggagtatgttattttattgtattgatttctgtttctaaatactggggttttcgtggtgttttttgtttgtttgtttgtttttgtttgtttgttttgagacagggtctcactttgtcacccaggctggagtacagtggtatgatcacagctcactgcagccttgaccttctgggctcaagtgatcctcccatctcagtctcctgagtagctaggactagaggcattcaccaccacacctggctaatttttgtagttttgtttgtttgtttgtttgtggagatggggttttgccatgttgcccaggctggtctcaaactcctggactgaagcgatccacctgcctcagccttccaaagttctaggattacaggcgtgagccgctgcacctggcaaaatattgttttttgaaactcttcttgaagtactaatgttgctttagatcttaaacagcagcacaaaaagtttctaactttgttggaacattctacttttcccccacaccttcccaaacaattctcttaatatacaacaatatctgttctggctatcgtgaaaattaagccactggatttgggttggaaaagaaggtttatttagcgcagtttttagtatttatatcagattgccatttctggcttgagacccgaggcagaagtatcccctgcatttggaaaatgaaaaatccactggaggattgattattcataaccctgaaatgtattgccccacctctaccataaatcacacggagtttttattctcattagctgaattctggcatctcagtctcggcactactatttattctaattctctcagcttgagtaatgggtgtggcccaagcaggaagcaggtcacctcctggcccgttggactatcttggaaagagcatgtgattccctgtaggattaggggatttgcagttcaatgggcaaattatgcattccaacgtctaagtgtggttgtttaattaaaccctttggttcattcaagatgactaaaatgtttcttgaaacaggacatcttgaaagttattaaaatttcacagcaaacacttttatggcaggaacttttatgaattttgtttgggttggggcattgcaagagggttacttaaaatgttttatctggaatttataataaagaaaaaacatttcttctttatgttggtcatattttcagtaagagtgcattacaaaaaatctacatctggatgacaaatgtgatacaaatggacaaatatatatgcatatacacaaacacacacacatgcccattttctcatccccccttctttttctctttcaatctgtctataaatgtagatactcacatatacatatatgtttatacatatattaaatatgtaaatatgtatataagtatatatgcatataaatatacttatatgtgatttgtgtatacataattacatgagtgcatatatacctaaatatgtatatctgcatatgcgtgtgtatatatttaagggttttcaactttggccctcttgatactttggattggtaatccctttttttgtgcagtgtccctgaccactagatgctattaccataggcacctcagtgataacaataattgaaaagtcaccaggaatttccaaattttccttctgttgagaacccctgcttattgcttggcacacatgcgcacagagaaacccatatatgtgtaggtcatgcacttactgtaagagacatggaaactactgtctcctagtttatccccaaaggactgacaagagtgttcactgaaaattcagagacagggttgcatgtaaatgtctgaataaaacacatggaaaaataaataataggcatgacatatcatcattggaaaggaaggtaccttctgatgcagacaggttgtgccacatgacagctgtgtgagcttgggcaagaaactagatctctctgagctttagttcttttatgtttgaaatgggcaacatcatgattatttttcaccacttgttgaatttatagatacagtgtacctccccctgcatcctcattacacattgactaaggaaatggaatggtctggaacacgtggcaacttggacatggggaggtctcttcgccattggctgagagtaagctgaacaaactttccatggtgacagctgcaggatgctcagcatgcagtcaattcagtccaacatccgtgcttcgtgatttgcatccatgtgacttgaagcagccagttggaccaggtttctgattgagtggccacgtgcatgatgggttgggttggactaactagttgtctgcaagaactggctaaacggctcagccaaattttctgtttgttgattcagacccgactgactttgccaggtttggactgtgctggtgagagagatatggagtctgcggacagtttgcaagcagtgcctctcgacattttcatcctgcatatggggctgtgtcggccttacctgtctaccttctttatcttcttccttcatttgttctcttcctcctcctcctcttgtttttgttacttggattttcaggatgtcaagccctggcatttttaatataaattggtaatataataatatattccctttattctttgtcattagctgaacgttttaggaatatcaatatagaatacatttgaatgttttcattaaaattgtaacacacccagtattaaatcagaaagtgaatgttcagcaaacacatattgatctcttgctacgtgccaacaactactccaagcacttggcatgaatgtaccacatttattctccaaaccagcctataggcgtggtcagggtgtgccacgtgacagctgtgtgaccttaggccagcaactagacttctctgacctttagttcttttatgtatgagatgaagagacatcatggtcactttgtaaaatttattccaaaacaaaaagatgtggaagaaaggcatattacctttggttgacattatctttgtttgtaggtgaagaaactgaggcttaaaaaattcacatatgttgtggctaagcagaagggctccccaggaagttgaccccttactctttattagtagtagtattaatacattttgagagaggctgtcactctgtcacccaggctgtaatgcagtggcatgataatagctcactatagcctcaaattctggggctcaagtgatcctcccagctcagcctcccaagtagctgggttacaggcgtgcatcatcacatccagctaattttattattctttttggtggagacagggtttcgctgtgcttcccagactggtcttgaacttttaggctcaagtgatcctccttgcctagcctcccaaagtgctggtattagaggtatgagccactgcatcctaccccttattctttgttcttaatgattatgttataatctgggatttcacataatcaaaactcttaatttctaatggatttaagagattcattaaacctctgaagtcacatacaaaactcgataactaacatacatttcttttttcctggagagaatgttcatagcttttaaatcaatatctcaaaatgatctttgttttcacagcaagattaaagataatcattatgtaataaaacttttattttctgtttcttaggtcagtctacagctcaatcttaaacagcagtattgtcatcaaagggtaactccagagaaaaaaaatcagagtaaataaacatttataataatatatctttcatcccttcttcagagtctgttctaggaaaatgccaaagtattccaaaaaaaaaaaaaaaaaaaaaaaacacccttgggcttttcattaactacacttcagtccttgagattatcttgatcttgaaagttgctggcctttgagcaacttcttcaaaccctcaagatgcatccccatggaccatgctggtcctttttcctgagccagccatttcagcacacatctttgtcatttcttgtcatattgagatcaagtttggccatcctctttgcaaaatcatattcagttttcttaagtaagattgtatttttggcatgcttccattagagtcagagccagcggtggctctcagttgcaatgctcctagagaaagggaactttaattaggacacaatggggttggcctagggctcgagttagattcagtattcaaccaatgttgctgcttaagcctgtaaatgtatggtatgcaacttgtgggtactttccagttttcactgactttcttccaatattgtgtagtgtgtaaagatcggaggtattaaatccaggacctgggaggtcatcacactcgaaggaggcaggctgggtcatcagacatatggctgtcttggttttgtttccttgttcccacttctgctcatgatgggcctaaataagagatattcctctactgtaagaaaagctccgtatcccaagtgaagctaattggtaattggtgtttcatgtcagaggcacagtagggagcagtggggattgtggcaaagtgaggaactcatgcctgccttcacagtgcagctgctcctcagctgcataccattttcatgaattagaaatataccagactttctgattgtttacctaagagagtctgaaaagtcttatttctaggtgctgtatgtccatttaattgttgttacttagtctagattatttttattgataacatagaacagtggtcttacatgtctctctagatcctaactaaaataataaatatcttatatttcatttgaaaaatatttcatatagttatagaattctagattttgagtaattttctttgagagctttgaagatgttatttcattatcttttgtttcctgtactcttgagtttttttaaattttattttaggttccaagatacatgtacaggatgtgcaggttcattgcataggtaaacatgtgccatggttgtttgctgtacctatcaacccgtcacctagtattagttgaatgtttgaaactcaaggttaaaccatacctgggggtgttatctggtcttcaattcaccactgttgaccaacagaggctattatgatttgcaaaacgtattttcataatcaacaagacaaaaataaataaaattttaaatctgatttttataacttttctgagaggttaaacttttggagagctagagaaagagctatgctgataaacaagcttacttagccttatgtttttgtttgtttgtttgttgaaagatgtttgcctgctcacttaaggatacttagcattagagaaaagtagcttttttgaaaaaagaaaataacttcgggttgccctttttgtccatcagtcttgcatagtgctttagacagcacttcatacactcatgcaactcttcacaaattaccaattactttcccctttgcgtttatctaatttaatccctacagtcttgcaaatagatattcaattctcccagcccatagcagcttgaaacagttcaacaaacacaattagcccatccctgaaaaaaagtatagattgcagtgtaaatagaaatttgtttttccacttcaagtgtggcacaaattatcacccaccttagatgaatgattaattccacaactgttaagtatgtttttacttttatctaagcaaatattttgagagtttttttcataacttagtttgatacctaagctggtaaatgttttgttcaagtttgctgaagccaagactaatttagaattagggaagttaggactgctttcaaatttgagagaaaatttggaaggaatccttagcctctccacagccaccaccctaatccaatgcaatccaattgcctctcacctgggcagctccagcagcaccctccctggattccctgtctccgtccttgctccctggcatcccccacagcaaagcagccatggagattgttctgaagtgataacccgaatgttttcctcttgaatgtgtgatttttttagtggcctcctgttgaaagcagaattaaatcaaactcgttgttttgctttcaggctctgcattatctggcctctctccagtctctcccttataactgtaccaaaccatggtggcatccttccttttccacaaacgccaagcttattatgaacctagggctttttgttgttgcacatctatttattgtcagactgtatggtcacctcctttttttttttttttttttttttactgagtttgaatgcaattattccttccctttcctccttggtaaaacagaactcttggagttttgttgtgctgactgcggtggtatcagcaccaaggacagcgcctacgtagcacatccagaggcttattaaatatcaggttcaacgactggctgactgactgatcaaagagagctacagcataaaggcttcagagtcaaagttgaactccagttctgccatccacgagacaggaaagttatacaacctccctaaacctcaattttcccattttacgacagggatgagaacagtgtctcccacattaggataccctatgtattcttttcctattggtccccagcaatcacaaatctaattggcaggtaacagtgagcacttgtttagtgcatgtgtctgtagtacaatggggtccttgatttaggctgcactcagtcatgtgtctgcaggtcagctggccctcaagtgaggaggctcagctttggagggaactctggtccctgtgtctcaagtcctctgctggagaatagtagctagtcagaaatgttctcttggtgaaggagaagtgcaagagaaacttctattgtgcaaacgccttcaagcctttaaccgcatcacactcgctgccggttaacattccttaaccaaagcaagtctcacagacacacccgcagtggaggggacactcacagccaacgggtaggaaagtacactctgcccatggaggtggagaaggagcaaatactcctctatggtgatctaccacacactaagagttgtgcaagataatgagtgttaagttcctggtatgtgataggcactcagtaaatgttagctaaagttgagaattactaatttttctgtaagaccctgtgcctgccacaataatatgaaagtaatgaatagttttatgttaacaaaagctaaaagcccccaggtcatccttaaatgaatgtatatcctgattcaggaatgccgtgattttaagaatacattagtgactgcttgtcatttacacatctcttaatttagctgaaatggaatacgggaaacatagcctctttaaatccaggttaagtacatttccattgcagggagcaaggtcggtgctgttcatctaggtattttaaaatgtggttccaaacactgcatgttctcacttataagtgggggctaaatgatgaggactcatggacccatagaggggaacaacacacactggggcctatcagagggtggagggtgggagtagggagaggatcaggaaaaataactaatgagtactaggcttaatacctgggtgatgaaaaaatctgtaagacaaactcccatgacacaagtttacccaaataacaaacctgcacatgtacctctgaacctaaaataaaagttaaccttaaaaaaatagaatatggttctggaaggaagaataaccgctgattttaggaagaactgtgaatgaaggcaaagacttcagagggagatggctctcagttttgagccttggtttctttatcagttagggatattaccagctctctgatagggtccctgtgatgtttagaaaagggtctacaaaccattaacacagtgagtggcacatgaacggctttgcaaattcttgctgcctttcctacctactgctcactcccttccttgttcataaaggaccgtgctgttggccattttgtcgtcagctcttctagtaggatgccctatgtgggtatcagaatacatttgtgcagaatcttctagctgagtcccttcatatctttccagtcatttgggggaaaaggtaggatctgaatgaacagagactttcacgcttacacttgctggcttagctgaattaggggtagcattacttaatttcacccatcacagatggttttacctgtcatctcagccatgagccaccttccttccagaactaggcatttcttctttatggtgagtgaacttagtttttgaccttcctttttataaaacactaatagttgcttataggaaattcaagtactgcagataagcaccaagaaaattagagttgcatgttattcatcatccagagataatgtgaattagcattatcattaattgatttttctgtatgtctaggcagagatatatcagggaaaatgctatttataacagttgcctttttgagtaatcatttagctgtcatctatttgtaatctgtatgtatatcctacctatatacataacaaggcaaatgttgctatgtatagccaacagccatcgcccaagaaaggcgggtagcaccatcttgttctaggagaggtccctttgtctgtggaatcccagataggtttgattttgcaagactgagagtgggagccagggaatacagcactgctctgcataatagagggagggaaaagtagtgttccaggaataggactgataggagagggaggggaagagagaaatgggagagggaaaggaaggaatcaatgctgaaaggaacagaaagctgggggttaggtggtatcaccaccaaccttcagctaagttgactacatttttaaatgtttttgcaagggtgggtttgtttccattcccctcttttttcccttctcttcattgtctttttctttccttcttttctttctattggatgaaccctgaaagtggtgcaatagagaataaataagataggaggagcctggaggacaataagaacaaaatctacctgagaatttgcaggaacctggggacatcactagacttccaagggccatagaaattggagctttataccaattttacttacatcaccaaggagaaagcatttttccagctatctgaattctctgtctttctctctgacttcccacattgtatatcaactgtttatatgttttgtagttttttaatatagctatatattatgaaaatttccttcttcataggcttctttctttaaaaaaaaaaagagcctgtaagaataatgaaagggctgaagaataaaatcattgaatgggtaccagatttatttttatgtattttttatttttggcacagtcccaattgctgagctttttcttgtgctatctctgattttccaccataacaaaccgacagtgatgagcaacattgtgtctatatcttaagcacacccaggactttctggagtcagttcctacaagtggaaatacttgaataaaggttatacaaatgtttaagccttttgatacacattgttaaatgatctcttcagaaaggttaaaccaatttacactctcaacagtagtgtttaagagactctttctctaaatctcctttaataatgaagagaagcattataaaatcctttccaattgccatttttataaaaaatagaacctatttgttttgcacgtatttggtaactctaagaatccctccccctttttttcccatagggttttgaaccagttgtgtttcctctgggaaaatctgcttcttcatgtctttcaagccttttattgattttcgagagaagtatctttatgttttgtttttaaaattcaaatgtggtgtttctaaatggtatgtgaagcatgatttcacttagtagacatttgtggattagccattaggtgaaaaataacactgaagagtaaaacaaatgctttttttgctgttcctgggagcgtgggatgcttatattaattgtttactggtgaccatggatgctgacacaatgattaaatgctttaaagccagcttaatgatataaagccatttcttcatttgtgtcttctaagtgaaatccttcctaagtgaaccacaagagtttcctgcttcatcgcctcagctgcagcctcagctgctgtgattacacttaccttgtctctgctttagttagtttttatcccctccctccaagaaagtaaactacctgaaggcaaagactaagagtatataccccagggacggggatcataactatgtacacagcagacactgagcaagcatttagaggagtgcattttaccattagactcttgaaggacgtcatactgaattttcagaattttttatgtacccagggcattttatgtgaacgtatttaccagggagggtcatgctgtgtatgacctttatgtcattctaccaaagaatcaggcaccaagacagctgcagtttctctggctactctgtttccttcttttagggaacttaggacactgggtgattctttaaaaaaataataacgaattaactttttgaattgacaaagatggtatacatttatcatgtacaacatgacgttttgaaatatgtatatattgtggaatggcgaagtcaggctaattaatacgtgtattatctgatatacatttttgtagtgaaaacacttaaaatctactcttccagtgattttcaagaacatgatacatgtcattaactatagtcaccatgttaaacaaaagatttcttgaaactattcctcctatctaactgaaattttgtatccattcaccaacatctccccaaccctcaccaaccccaatcccaccccagcccctggtaagcaaacttctattccctacttctatgagttcaactatttcagattctacatgtaagtgaaatcacgcagtatttgttcttctgtgtgtggcttatttcactcaacatgacatcctccaggttcatccacagtgttgcagttgacaagaatttatctctttttagggctgaatgacattccattgtagatacagagcatacttctgtccgttttttttttttttttctgtgggggatggagttttgttcttgttgcccaggctggagtgcagtggcgcggtcttggctcactgcaacctctgcctcgtgggttcaagtgattttcctgcctcagactcccaagtagctgggattacacgtgtctcccctcgccgccatcaagcccagctaatttttgtatttttagtggagacgaagtttcaccatgttggcttgcctggtcttgaactcctgacctcaagtgatctgctcacctcagcctcgcaaagtcgtgggattacaggcatgagccacagtgcctggtcatgtccattcatctgtcagtgcacgcttaggttgattccatatcttagctatagtgaataatgctgcagtgaacctgggagtgcagatatcccttcaaaatactgatttcgtttcctttggatatatacacagtagtgggattgctggagcatatggtagttctatttttaattttttaaggaacctccataccatttttttcataatggctgtactaatttgcattcccaccaacagtggggcactgggtgattcttaaagagagtcttcaaggaaaatgcaaaagctctacagtatttgggtggtgagacagaaagtggagaaggatattgtgttctagcacactgcaaacatggttactgaatttgaaattcagaaggaagagaagggatttattttccagctcagaattgcaggtagagcctagctatgagaactcctatttcttacatcatcaaaaaggaggaaggagctggttctcctttgagagatttttgtttgtttcccccatatctccattcatttattcgttcattcaaaactttaaattttaagcttttcctccattgacttgaagtaagtggaaatataacttataaggaaagtggaaaacaaattacattcaccactctgtgcttgctcattacaagtaaaggttacacatctggctggggcagaggtcttcaactgacagttcctaggccttttgtactttgctgtctttttgctgtttcatgttggaattcatcgtcagcactgaagtatctggaaattttgcacagatctttatatttctggcttttcattaaaagttggaagatctgacaaagcttgtccatcatccaatataacagcaatctgttgagctttggtagttgttaaatgttttgggtgtagcctgagtgtttcagttaacctgctttactcattggtgtcagctacttgtcctagacgtaacctttttcatttacatcctttttttttttttttaaatttgagtcacccaacgctaaaggtatttaggttggctattattatttccacttttgatggcattaggtatctctgggctaatgttacatagtaacgtcagatctgggatgtgaacgtggtacctaaattcagaccaagtgatctttccctaactcatatgacctacccatatttggcagagccgttatcttagagcctccaaaaatgcatgtgtgtaatcacacacattttgtaaattttgtaaataagcatgcacatatgttaaaggaagttcagcatcttgagcctctgataataagcccttctgggtaaatgagtgttctgcatcttttccatctttttcatttacgctcttataattacctttaaacacagcatcactggacacagcaaacatatctaggtcaatctgtttgcattttgatggctccgctggataaaatctcttctccactttcttgtttctttggaagaagcagagaccaagacaaaagaacctgtggttcatagtggcttcaccattcacaggtattctcctgggggtcaaatcaacaaatcattctgtcagttctgtggagctattcagaaattcgtgttgatgtcagtggcaacaaggaagagcggagacatgtcaggctttggtttctggttcattttcactctaactgctttgcatggtgttctccggcttgacaacccctcaacctcttccttgtccttagggtaaagtctgagttcccaacgagacttcaggatcaatcctctgcctatctatacatcattgaccttgtcatcacttcctttctaaccatctgcaaaacattaaatgcactctcacctctgagtcatttctggatgtctcctctgtctgaatgctctcatttccagcctcttttcctttttctgttcagctcatttctacatgaccatcttgcctatgctttgacatcacttctccttaccctacttctcaggtggcctagaaacccctactccatcaccacatagtattctgtgtcgatctatggagcctctcgttacttaccttgctgcctccttgtgactgggagttcatgatgggaaggaatcttttccttgtgtctccaacactgagtccaaggtctgcacatgagagctcttgagaaatgcatattggaggatttaatattttgttcgttcattacctgaatctgaagagtctttatataggagctctcttgtatctagaaaggggactattacagtgtgagacagcaaaggaagaattgccttgaaaatacgttatggtgttagcagggatggaaagtgtaaatcctcctaacatgtttttgagagtttacttcactttgggcattgtgttgttgtgctaagaatgccctttacttccacctgttattttaattctcacatcaaccctgtgacccccttgtttgtcaatgagaagaccaatgagaaaagaaatgaaatagtttgcctgaaatcacacagttcattgttggagaaacaaggatcccagaaggagctgtttggcagcaaggactcatagtattaaccactccataaagaaattcttgactcatttgcctttagcccttttcttggattactaattcagcaggaagaccaaccctgggctccttaggttaatcgggtttattggattatctagcacatttcttagattatccaagctggaatctccattgccaagatatcactggcctgattaaacaagctgcggtctctaaagactccaaatgtcatgttcctgtctctctctctctctttttttttatcaatatatgcccattttaggtgttattttattatttctctaactgtaccaactcatcattgtgttccaaaggacctcccaggtatataatcctctctgttgctacttaaaagaggaaaaatttttcttttcaatcctgtcttctgattggaggtgaaagccattcaaatctaagttagaaagacattcacaagccatttttgcaattgttattatcctaaaactaaattataggcattacgtctctgaagcattattgctcatacctagaagggtgctttatgttgtatttcatacaatgatgaacaagaagaaaaagactggaagtttagaatgagtgattttggtctgaaataggtatgaatttttcaagaatgtggtcactgcattttgtaccatcatttctctagacatttcaaatttcaattcactcattaatggctcaaccgttaataagaaggtgttttccacagttttcttgagttttatttgctgttgtgtcctgagtgtgcataattttggaactttataacagtagtgtttttaatattttattcataatattaacgttagctgttatttagggagtatccccaatgtgccaaaaataaccccatctccgatctttgcaacactgttgaaaaatagaaagatagtttctattttagacaatgaggctgagggtagagatatgacttgcttagtgataaacagctggttaaagcctgagacttaataggaaccaaaaattgcctgaccttaaactctgtgctatttccattctatcacactgctgtggaaactttgagtacaaaaagatttcgttaaaaggatgttaattgcagagttgtaataatagtgactacttggtaacaatataagtatccactgataggggattggtttaataacattttgttatatccacataatgcaacattatttaatgtttaaacatgcactttaaaaataagtgaatatgtattgccatggcaagatgtccagcttatatttagtgtaaaagagattgaaaaagaatttgcaccacattatctatttttaaagcatgtttatatttgtgcatgcatgggcgtatccctaagcaaggtctggaccagcactgttcagtagaaatataatgcaagtcacatatgcaaagtaatttttttagtggttgaattaaaaaaataaatgcatgaaatgtttgttttaataaattttacttaatatatccaacatatttcaatatataatcaatatagaaatattaacaatatattttacatttttttgtgctaaatcttcaatgtacatttttatactgacagcacgtctcatttcagatcagtcacatttcatgtgttcaatagccacatatggctttccgttaccttattggatagcactagtctagaggaaatataataagatcataaagtgttcactttgggatggggtgattatgtgtgttggtgttagtttattgtctccttttgtcttatttgcatttcccaaatttccataatgaatacatactgcctttgtaatttggaattaaaatacactgttaaagtcatcattcatttttaatagggagtggtgagcttctaaaatgcactgttaaaaataaatacatagaatgtaaatccgtgacctattttcagtcgaggcgagaagctggagatggtatgaggttggctctcctctttactcccttgccttccagctctgtaacccctgctcccaaaagccaggcctctggggttctgatgaggggagaggttaagcctcacctccacagtcagcgagcagatctctgatgaagccaccattcctaccagaagttctgaggtttggcctcagattcattttcaatctctttgaaagacaaaggcggctgtcatgggagaagcctacactagtttgtctcaatcttttatggcattattgctgacctttcaccaaggagcctttttagaccttttttcccttcctaatcaccattccccttccctcattaaattttaataccacacatacactgtatgtctgtttataccatgtaaactgtgtgtgcgttgatgtatggtggccttctggatggccacaaaccaaagtcatatctaaaatttcttaccctcttgtaactaagaatccatttccacccctttagggtaaataatcgctccctgtctcattgagaaggacgcccagggccatgttcactggtgccaaatgtcagtaatacggttgtcctgtgagttgcatttaacttcgaatcttggaccagtcaccagctctctcaccgttctacgcacacatctttgcctttgtggatacctgtcacttccctatccccactagggcatctgaaagtccatcacacccgggaaacctacccaagtctctctccctgaccacatgggaaacagcctttctgtttctcctgtggcatgtgtcatggctggcattctctgttactcgttctgatcctgtctcctctccccctctgatccgaccctcctggagaatgggatgctgtataatttcatttcccgtgtgtgtctagagccgggctttgcatgccatcgtccttcagtgaacagttgtgaaactgaacgaaattgccttcggaaaaccctttccggtccaactgtttctctatcagaaaatctcattaagacttaatcgctaacatcttcccatccccggggtcatgctgtaatccccagctgagagtgcgatccctgactgggaggaagtgagagtatcatttctttcccagaacccacacgcttcctgtgtatttcccaccacccaaaggtcaccacctggggtaaaattacatgcaacctcatgagacttgctgcccctctatcttccctcttttatttctgaagtcactgtagggaaaatgtactgattgcaaactgaaatagcagccactgggagctggactggtatggctgtcagccataccccccgggtttcacctgcttaatgagccggtagcccatgctttatccagtagagacctcactgtctcccattccagcccaccgttgcccacccttgcttatccacacctaccaagagccccttcccgagaactgctcttccaaagtgagattgtactcccaaccctcctctgtagccatccttgggtccagtgtttatttctttgtggccaggaaatctctcccttgctctgttctgcatagatgttgcctgtgttagaatttcagtagaactctgcagatttgaatggaagatttgagggctgcaagagctatcatcgttgatagcaagcatttagctaaggaaattaaattggaagtccttgcattctggctggattctgttactctttgggcagggaatgatttggtttcaaggagattccatcttcgtatctcctgctttcaagggaggaaagggggaaagaaagctgaacagagcctaatgaaggaattctgtatcgacacaactctgacatttgagatgttcaatgtaatcagcacaactggtagctttaggcattgatcactgtgctgaaatataaaattcagttggccatattctgttcatgaaaatgccttttcataattcactgcttccagaggtaccagcgataatttcttgactattttattctggagagctttaggtatggttaacaatgtgccatgtacagagaggcatgtatgcacaccataaagatcttaaatgcattttcagttcagtgtccttcttattaattattctagtcactttaatttattcagcctccgtattttatacattaaaatgagtgaaaatgataagaaatattaatggttgtaattattgactgtatatttgagattcatgtctaaatacacttaacttgggaagatttgacattctgtttcactgtgtgcattatttgcctgtttcatcttctatattctcctaaaccctctctctctctctgtcaaggggggaggcgaattactgcaagtagattatgaaatattgttgtacatgcacgtaaaaatatatcagtactggcacatctgtaatttactcataagtatgagattcatattagagatctatatatcatataagcaaaataatatccatcctgtactatattattttactaacatgatggctgaatttcaaatgaactgcaaaggtcatggttgctgttctattagagccatttaatctcatttgtctccccattactaacctcaactttattagttgctgcaactactgctgattttgaaccgagaaagggttcctctaactgatgtcatttcatgctttgaatttacaagtaagagaccctgatttaaaattattagggctcctgggaaaggagaacattaaaagtttgcagtggtcctctggtttcccataaggtgaagtttttagatggaagaaagatgggtcctgtttcacctatgacatattgcatacctttccaagcccttgtattccctcacctcttgcccctcttcaaactagtgatcacgtctacctttgagaaaactagtagctaaaatgaaacaaagctactttatgaaaagtccatgagaagcaatttaacctggttgaccatctccatcaatctgtcacctggagagaagctgttgacaccacatgacctctcctccaccatcacgctatgaagttatcacttgagtaagggctttctctttgatgctatacaattaaactgaaggaaggaaggctttcgctagtaggaaagcaactgcaaagagaggcttaaaccctatggaaacaccttcccctctcaggcacacacatgcaaattatctttaaccaaaagcgaatgggttccagtcgttcagcacacatcacatataagatattcctagggcaggaactttttttttaatgagtgagacccctgtagagttcatgccattgcataaaatattgcagccatttgcatttaatggtgatacaaatactgctttgaacactgggaacatcatttactgagagaaacaggagatagtcagtataaatctccaatgtaaaaaaaaaaaggattaagataaaaagtagtttaaactccaacactttctctgtattttttattatttctaataaacaagcctatagcttttgaaattttatcactaacttgagaggtgactgttttctgatgtttatacatcactcacttagtcatgaacttgtagtaacaatgccacatgctttatcaatagctggtgagttaattgggagggagggaaatgttttcttaaaaaactaccttttctccagaaaggataattttatgtgtgtgtaataagaatctagtatacctggtgtattaggtgcttaatatattgtaggcccttggtaaataattctgggataaatgaatgcctgccaatttatactgtcattatccctcccctccctgatttagtaatttcaggctcaagtagttgatcccaatgcttttgtgcaatgtgtggcttgtcttttgtcattgtttataagctccataagaacagagactgtctattcactgttttgtttctgtaaatatataaccatatattgtgtatatggatccttaagcatgaaggcttagaggagataatgaataacacttttatacagaaatcaaaccaagactttcatatcattatggaatcacatgcttttagcgtaattaaagttgttgcatatagaacaaataagactgcattttctttagctgttaacttggacttgccagatatccagacatgcttcacttttggtttgaattaacaggtgaaataatacagtgtgtgttttgttaaaattttattaaacgccgctcttaaaaattaagcaagaaaatgaaagaaagaaacaaaaacaattaaccaaagatcacccacaaagctcccaaactgttttgttctgggtgctaaggcactgtttgattttttttttcgtgcatattgatgtactctttccccgttaactgcttctagtctccctggacctccaaggctgcatcttcagggaataactcatcgcatctccattatgtgtcatgtagagacgctatgtaggtaagataacagagtctggctaaagggcacgtttggtgttatattccattagtttattgatttttttttaagtttctctaatgttctaatgagaatattttccactcaatcctgaaggagtccaaagctttttacgaacttcaggatagaacacacagggactgattccctaggctgccgaacagcagggtccttggaaagaccaaatggaaaattgcttttctatgaaccccaggtgcaagagttagggaacccctatctaattaagagctgggggagttctgatgcagtcactggggttggacccatcattacggtgaatgctaggctctggccaaacacctacagccccttcaagggtcaagaaagttcatggcaaaagatttgagtcacttcaggggatggtggaagtttctcccaagcctaccttggcgtctatgactccacctgaaaaatggcccaaaatggacaataaaggaatttggagggacaatggcatcaagtcaggacttcctctgtaggacacatatccaaagagccaacccactagagctccagccgcagttcttgcttgttttggctgtgtgaatttgggtaagtcacttagcttctctgagccttagctttcaactttgtagaatagttctgagcattaaaggagacagtatatgatgtataaagtggaattgatgaatggcaggttctcaataaaagttggcttgtggttatatcattatcatcactactactgtcatgatgtccagacatcaaggcagcagaatgtgtcctccatgtgttaacctggggcccagcctctatttggtgcctaatagttaaaagttggatgcttgttgagtaagtgagtgtatgagtcccttgtcgtctccctgccaaagggaacacttgatcagcataggagataactaacggcagtaactttgctctgagctcttgcttcttcatcaaaccgtgctttaaagacttccctgtgcagaggcagtatagaatgaggctcaggaactcaggctctgtaggctctctccactcacctctttatgtgtctgacaggatgccagtccaagcatccttttccttattgataaaaataggcatcatgataataatagtatctacctgataggatggtgaggacaacaaagtgagatcacgagagcctgacactaagaatcccctggagagctttgaaagcattactgatatccagaccctctccccaaagtcttggattcatttgttcaggaggcaaggttcctttgggcatcaatagtgtgaaaagccctccaagtgattctaatttagagcctttgcaagtcactagttaaggggtggtagggtggctgttgttaaatcatcctaactttttgtcttttcctgattatccctttctctgttggttcctttttcacatttatgggaaaagcaattatgtacctttttggaggtttcactatgttttccttttgctgggggtaccatttctgggaaatatgacacagagaaactttgtagtaagtgaaaggtaaatatagttatatatctatagatatggatctgtatattgaaatttaggaaatgagttatttctactgcagtaagccacattttcatgcatgcatagcctgccattttatggttgctgttgttaaatcattctaatattctgtcttttcctgattgcccatttctctattttttttttcatattaatgggaaaaccaatcatgtacttttttgaaagtttcactttgttttccttttgctgggtgtaccatttctggaaaatacggcactgaaaaattgcaataagtgaaaggtaaataactggatatatgtctatagatgtggatctatgtattaaaatttaggagatcagagttattcctactgcaatgagccacatttgcaggcatgcatagcaccccactttgtggggcacccattgctcctcattctgggtccagctttgattccctgtggctgctgcagtctctggctcatctctgcagctttgatagctgtctcaaatacaatctgcaatctatcaaggagggcgtggaggtgtcctgaataatcagcaggtgtcttggttatcaccaaggagagggcatcatgcccggcatgcatggatggcagaagagttactgcaaaggcagttgtaagctcaggaatccaattctttttctaagttagtgctgaaatgtggctgactcagatgtggggtgtcaggatcatagataggacaagagagaaaacttgtgttcttatttgaaagccacagcctgtgtggagaggcctgcagttcattgccactggacaagagagtaaaatttctgggacctccacttactctaggaagtgttagagggtgataggaaaggagtttgtgcagacttctgcagcctctgcaggtggaatgactgttctctcctctagtctcttagagtctgtccacaacctctgaatagcccttattccttggtgagtcactcagcaaatgagaaattaaatgctattgtgcatgctttatattatgtgtatttcttctctgttacattctaagccacttgatggcagagccgtgagttactttgctcaggatattcagcaccaggaaggtactaggcacacatccttagtacccaggaagcacaggggagttgaagatgctttgaaagacctgtttggcccttcaggtagacatgcatgggccctgagaagccccagaatttcgatgttctcaggaatcatcaggagactagaagacattgattctcaaccctggctgggtagcagggctccttggagagttttaactagtcttgatgcctggatcccagaagagaccaatttaaaccagtgtctctggatttggagccagagtacctacagtattgtagttccttaggtgctttgggttcaggcagggctgaggaccacagctccataataaaaggatggctgagctaaaaggggtgataagaggtagaaagaggctgggaacggtggctcacacctgtaatcccagcacagagaggccgaggcaggtggattacatgaggtcaggagttcgagaccagcctggctaacatggtgaaaccccatctctactaaaaatacaaaaattagctgggtgtggtggcacgtgcctgtaatcccagctgctcaagaggtaggctgaggcgggagaatcgcttgaacccagaaggcggaggttgtggtgagctgagattgcaccattgcactccagcctgggcaacaagagcaaaactcagtctcaaaatatatatatataaattaaaaaaaaaaaaaaaacaagtagaaggaaggagtgatacaactgaaaggagaaacaaaacacagaaagatcttggcggttttgttacatcttcagccccatcaaaccaacacccttcaagctagacactttgcttttagcattttgtcattgttaccctgtttcttactcacagtgatcttaaacaaaatgactaccctctttgtagcaaaggaaaggaagcttataaactgatgtgctaggctcctggactccagacctcaagcacttagccagtaaactgtgttccttcaaaaagacaaggtaaatatgaaggaaaaagggagtgaactggacagaagaaaaaacaaaattggtaaactcaaggaaagctgataggcactaaagcaaaaacaaatgagcagaattcatagttgttgagggcctccaagatcttatgagaaactcagaaggtgcaaagcagacccagtcatctccagcttacaacagatctgggatggctcacagtagtccagtgtcttgctcaaactcacaaagctaagtctctgagctagtttttctgtaagggccaaaagctaagtatgttagtctttgctgaccacgtagtctctgccacaagtattgaaatctggtattgtggcagaaagtggccacagatagataacatgcaaagaaataaatgtagttgtattacaataaaatttgatttatggacactggaatttgcatttcatgtaattttcaggtgtcatgcaatcttatttttctttggatttttctcaacttttttttttaaaaaaatgtaatcaaccattcttagctcttggctatatcaaaatagatagtggggcacatttggcccttaggctgtcatttgccagccctggtccaaactttaaagtacccagagggtaaaaagttgatgagaaagcatagaaaaaaattgatacatgactatttgagacatttacccccagtccaccttcccacagaaagatccatcaggccaagagtccaacactttccatcttccatgactcaatgccaccaagcagttatttgtagaatccatttgcggttttcaaaccataggctctggacttcaaagcaggccagtcccattctttttgtcttgaaatgagtataataagctcccagaccctttgttctagcaatatttattgaattactaataaagactagactctgttctgcgcactaagggtgcagtggttatcttagtctatccagttgccatagcaaagtgccatagacagggtggcttagacaacagaaatcttttctcttgcagatctggatactggaagtgagatcagggtagtaggatggtctagttatcatgtggtctcggtggcttatggatggtggccttctccctgtatcttcccttggcagagagaaagagagagagggagaggaaagaagtgggtgtggagggaagatgtcttttctttctttttctttatgttttcttttcttttctttcctttattcatttatttatttgtttatttatttgtttattttagatgtagtcttgctctgtcacccaggctggagtgcagtggcacgatctcagctcactgtaacctccgcctcccgtgttgaagcgattctcctgcctcagcctcccgagtagctaggattacaggcacccaccaccacgcctggctaatttttgtatttttagtagagacgagtcttcgccatattggccaggccggtctgaaactcctgacctcaggtgatccgcctgccttagcctcccagtgtgctgggattataggcgtgagccaccatgcctggccaggtgtcttttctgataaggacactaatcccatcaggagggattacctttgatatagtttggatatttgtccccactcaaatctcatgttgaaatataactcccaatgctggaggtggggcctggtaagagctgtttagatcatgggaatgggttcttccttgcttggtgctgtcttcacgacagtgagtgagttatgagatctggtgggtttttgttttttttttttttttttttttttttctgagagggagtcttgctgtgttgcccaggctggagtgcagtggcgctatcttggctcactgcaagctccgcctcccaggttcacgccattctcctgcctcagcctcccaagtagctgggactacaggcgctcgccaatacacctggctaattttttatattttttagtacagacggggtttcactgtgttacccaagatagtgtggatctcctgacctcgtgacccggccgcctcggcctcccaaagtgctgggattacaggtgtgagccaccgtgcccggccggtagagatgtggtgattttaaagtgtgtggcaccttcccccacgctctcgccctcttgctcctgctttggtcacgtgatgcttctgctctttcctcactttccgccatgacgaaagtcccctgaggcttcgctggaagcccagcagatgcctgcgccatgtttgctataaagccagtggaactgtgagtcaattaaacctcttttgtttataaattactcagtctctggtatttctttacagcaatgcaagaacaacctattacacctcatgccctcatctaaatctaatcacctcaccaaagctctatctctgaataccatcgcgttggaggttagggcttccgcatatgaatttggagggcacacttcactccgtaacaatggtatacaaaataatgaggtttctgtgttcatgagcttacattctttatatttgacaataaaaaagtaagcaaaaagtaagaatttttagctaatgttaaatgctacaaagggaaaaaaaataagaaaacatgtaccgattacagagatgaactgggacaggaattacaagtttggaaactgttttcagggaaggcctgtttgagcaggtgacttaggactgggggtgagtggtgtggaagcactcctggaggttgctggggggagactggaagactgagcaatagggagagagaagatcatgttcaaaagggccactgagaccaaaaagctccccaaaacaaaaacaaggttcaaaagggtgagccagcggggtagacaggaggccagcatacctgaggagagtcgaagtgggggacagtagctcccactgtggagagtttgagtgttacctattaaatgcaatggggagctgggcacagtgtggcttatgcactttgggaggccgaggtaggcaggttgcttgaggtcaggtgtttgagaccagcctggccaacatggcaaaaccctgtctctactaaaaatacaaaaatttagctgggcacggtggctcatgcctgtaatgcgagcactttcggaggccaaagggggcggatcacttgaggtcggcagttggagaccagcctgggcaacatggcaaaaccccgtctctactaaaaatataaaaaattagtcagatgtggtggtgtgcacctgcaatcccagttacttgagaggctgaggcaagagaatcacttgaacctagtaggtggaggttgcagcgagccaaggttgcactactgcattccagcctgggcaacagagtgagactctatctcgacaaaaaatttaaaaaaataataaaataaaatgggaagccgagcacgatggctcatgtctgtaatcgtagtactttgggaggctgaggtgggcggatcacttgaggtcaggagttcgagaccagcctggccaacatggcaaaaccccatctttactaaaaatacaaaaaattaactggttgtgatagtgcgtgcctgtagtcccagctacttgggaggctgaggtgggagaatttctggaacctgggaggcggaggctgcagtgacctgagattgtgccactgcactccagccggggcaacagagtgagaccctgtctcaaaaattaattaattaaaccttcaatgaggaggttttgttgagtcagaagcacttcagtacagtcatgcagcacttaatggcaggggtaccgctctgagaaacaaatcgttaggcaatcttgtcattgtgcaaacatcagagtgtactcacacaaacccagatgctgtagcctacgacacatctaggctaggtgatctagcttattgcatctaggctacaaagctagcaggttagtgtgctgaatatggtaggcatgtgtaacatcatggccagtgtccctgcacctcaatatagctaaccatagaaaaggtactgtaaaaatactgcattaacgtcttatgggactgctgtcctgtaggcagcctgtagttactgaactgaaatgtggttaagctgtgtaggactgtgtttgcattttcaaaatattttgggtgctattcagggaacggacagtagggggcaaaagtggaagtggagaaaccaaggaacaggctgctgaagaagtccaggcagccttggaggactcgctctcactcttactggttttcgatgcctgagttacttgctctctgggagaaggaagcaggtcgttcctctgcccaaattgctgctactcaggagtgcctgacactcctttccaaagatgctctgcggtaatatgttctaatgaggagtttgaattgccaattgacttgctctttgcagctaataaagaacagattatgcgctggatggtttgcagttggtggccaagttgtcttgtgattattgtaagttcttttagttgagcttgtgtaactgtgagtcaatcctgcccatgttttatttggaaattagtactagagcctccttgggactagcctttttctcacccaaaggcaaaagaatccatctcggctgggcacagtggctcacgcctgtaatcacagcactttgggaggccgaggtgggtggggcggatcacgaggtcaggagttcgataccagtttcaccaacatggtgaaaccccatctctactaaaaatacaaaaattagccaagcgtggtggcaaatgcctgcaatcccagctactcaggagcctgaggcaggagaaccgcttgaaccctgaaggcagagtttgcagtgagccgagatcacgccagtgcactccagcttgggcgacagagtgagactccatcttccatctcaaaaaaaaaaaaaaaaaaaaaaaaaaagaatcagcctctggatcacattaaccctcacagcccatagtccttcgtcttcctctgaaaaaatatgaaatattaaagattcttaaaccaatgagcagtttccggttattccagaatatacagcacgttggtgacttgttccacattttctttttctcttctcagtgcttcctgctagacatagacacatacacacacctacaccccttttaacccattttaaataattctgtttagaaaagcaacatatgatcatttaaaaatattgagaaacacatacaaaagcaaaaatcatccattagctgctcatcacccccaaataatcactttttaaaaacattttgatatttctctttttggggtctctgtgtgtgtgtatgtgtgtttgtgggacagagagagagagaggcagacagaggaaaaaagcttacagtatttgactgatagtgaatttttagaatttatcgtataattttttacttggtattaaaatgtgaacattttaccatgccatgaatcattttgggaaattacatgtaatgattccataatgttctgttgtaccaaaagttattacctctgttgttattgaagaaattttttatctttctcccttactattattaagaataatgtcacagagaattttcttatactcaagtctttgtttacatttttgaatatttccttggactaaatgctaaaaagtattgtgtcagggtcggaagatatgagcatctttatactttgtgaatagattttatgttgctttttgaactggttgtgcccctgcacatcccataaccatagcgtattagcataccgtttaatctagtcattaccaacattatttggtattattacatactttattaatttgataggtaaaaattggtattgccctgtttaaaccttccccttttcatcttgtctgtttcgtaatgccaagagtaaacacatatcatgctcttaacacaatgtgaaatactgtggaaagtagatactactgtcctcattttacaaattgagaagctaatacttctcgttgagaggtggagctaagatgggaacccagtgtaggcaatgggaaccttgagtctgagccttagccagggctctgttccgcccccaggcaggagcaggaacctgagaggaccttctcagttaggtgtgaaataggaaagcagcctcattgaagtaattcacactaacatgtgaatgacctggaagcatctgtctggtttttatgaaaaaccaaacagaattacttgttatttcagataagcttctcctttgtggatggaaatgtaagaagtttaacgcaagtaaaaaaaacatctaacaatgataaaggaagataccatcgggcagattcagaccttatggaaatgtaagaagtttaacgcatgtaagaacacctaacaatgataagggaaggtaccattgggcagtttcagaccttcttgcaatgcagtggtggctcactgctggcccacagactagaatcatatttattcctatgagataaaagaaaataggtcttaaaattcagtgtttaaaatactaaatcagttgctattagacaaacctctactattctaccttctctttaaaaatggaagctctggaaacattcactactgtttctttcagtaattgactgcatctgattaatcccactgatgcttcaccttgcatctgttagctggctagctctcttcttccttccctatcaactttccccgctttctccctttctgagccaactctctaaaacttttctttttgataagaatattatattttaatgaaaatcctttctgtcatggagaatcccctttccatcatggttaggaatggagacttaggggttacggtggggctgggtgctgagtcatttggaagacacacatgtgcaagttggggcctgtgtctttattagccctgcttaaattgctgggtaatttaagcctctcttattttgctgcattgcctcacagttctaaaggagacctgaaatagagtgtatcacattgtgcacatttttgaaggatcatgagagcagcctaaatataaaattcacgtccatattcttagtgtccttttcccctaaatggagacgggatgcacttgagcattctgtcccatgcttgcctttgtctacacgtgtttcctaatgtttgatctctgtcctttttgtatgtgagaacattcacaggcatcttcctagctgcaaaaagacgggcctgggttgcaacaactggatctttgttatttcttggggggagctcgtatcaaactctccccaatccatgtagtgatttttttctacatctaaaaatgatcctttaaagtttcaatgatgccttggtgacccaggaccactgttgtaatttttgccagtttctttgtatcacttggttgatcttgtattaaatgtctaattgatttgtttttttaaagatacgtgcatgttagtataataactagaagctcgatgttatgagttgaagcataattatgcaagcaacttaatactaaacttagaagatacgtgactactaaccaagaccatctgatgtaccattgatggctcaaatgccagatgtcgggaaacagtgatttaaaaggaaatatttcatgggggtcagcataaagtcggtcctgcttctagaaagccacagtagttctctgtatccatagctaagggtctcttaggctcttattgtaaatgtctgggtttcactcaggaaaaaaaaaaaatctcaaagctatggccaaggcagaggcttcctcacagcccatcccctgtgcatatcgattagttgacatccatgagtgccccagtcctgctggaaatatcccctcaggcttgcttttctgtggtatcaccacctattcccctcttgttactcggacctctttgaagtcatcatagtgtttttgggaatagagaataccactttgcagagagagtgatagcggcttgtgatcatatcctcttcatatccccattgtcggcgtttgtaagaccccaaatgctcctgaaaacttgatttctaatggttatgcaatatttaaatgttaatagattactctttgcttgaccatttccctattttattttttttgagaaagagtctcgctctgtcatccagagctggagtgcattggtatcacctcggctcactgcaacctccacctccctggttcaagtgattgtcctgcctcggcctcccaagtagctgggattacaggcgcccaccactacacccagctagtttttgtatttttagtagagactgtgttccgccatgttggccaggttgggcttgaattcctgacctcagtgatccacctgcctcagtatcccaaaaggctggaattacaggcatcagccaccatgcctggcacccgtttccctagtttagacatatatgttgcttcttattctgcatcattcattcattcatcaaatatttataggcaactatcacttgccaggttgtagagaggacaggaaagcagtgctgagcagccaggcctctggatccttcttctccatcaatctgtgaatttttacttatatctgagaagggggagggatggaaggagggaaacaagggagaggagagaggaagggaggaaacagacgcagctgagagctcctgaagctcctgaaacctctgaggagcattctcttgctttgtattcttttcacagaaccagtgactcttgttttcttttaaaatcctctcctccctcccctccctcccttcccttcttcccttccgttcttcccttccttccctcctttcttccttccctcctttcttcctccctcccctccctccttcctccctcacttccttccctgctttcttccttttccttccttctttccttccgtccctccctctctcccttccttcctcccttcctttctgccttccttccttttctttccttcccctcccttccctccctccttccctccctccttccatccttccgctctccctccctccctttcctccttccctctctccctccctttcctccttccctgcttccttctttctccttccttctttcctctctccctcccttccttcctcccttccttcctccctcccttccttccttccttccttccttccttccttccttccttccttccttccttccttcctccctttctctttttctcatctatgagccagaatgttacgctaagttttggaaacagcactctctgctgtgtctttaggatgcttgtttcctgcatgctgaccagacctcctgttggactgatattctggataatggcttggtgcctttctagcttctaatctaaacaagaattatttcattttagattctctctgctgcatcaagggtccctggaatttgatgatgacttaagtggaaatcccagctttagcatatataagctcagtaccatagaccaagtgggttaacctctttgtgccttcattttttcaatggaaaagttgcaaacaagatacttacctcccaggattttcctgacaatgaatgagaaaatgtaagagaaactgcctttcgaattgggaagctctattctgatgaaagatggaccttatttttaaatacaggacgtttagtaattttatctaaattccccattcatcagaatacagtggagaagatatttgccatacccatttcattgtgttgttcataaacttgtttatttttccagggctggattggtttgcctttctctctttctgtctgctactgcataatttcattatctgccatacgtaaatgtattatgtaattctctcagttgtcattgattgcttctgtttttctgtagtattactggtctataatactttttattaaatccccaaggatagttcctgaactgtggttgaaggaccctcctttccactaagtaaaatacaacacttagatatttgaaatgacacaaagtactagagaaaacataagtgtggaattttcccactggctttatgaaatccaggaaaccaattgagatatttgtttatgatgcctttgtctatcctggaggtttctctctgcgttctttcaatggcagtcacagcatcaacaaattatataaaattagctaatgtttattgagtgcttactatgttccgagtaatgttaggaactgcttgcattgtcatttaatcgtcacaacagcctcataaaggaggtacgctttgttatccccattttattcttgagagaactgaaattcagaaagtttaactgctttgctcagagatacacaataaagaagagatgaaactgtaaagcacacccctctcacacacacaccacacacacatacacaactttatgcaagcttagcaaagtcagtttccttcttagcttggagaatacatacatatgttgaatgcctgagagtttgggacttctctgctctgtacttgcttctgacactaaccttaaactaatcacttctctctggaactaggtctacttatgggccacgtttgaagggttggatgaggtcattagtttttatttatttatttatttatttatttgagatagagcattaggttttttttactttttattttatttttttgaggcaaggtctcatcctgtcacccaagctgcagtgcagtaagacaatcttagctcacatcaatctctgccttccaggttccagtgattctcatggctcagcctcctgagtatctggaattacaggtgtgtgccaccacacctggctgatttttatatttttagtagagagtggattttgccatgttagccaggctgtctcgagctcttggcctgaagtgacctgcctgcctcggcctcccaaagtgctggaattagaggtgtgagtcactgcacctgcccaaaagcattagcttctaattgacctcatgatgttcaagaatctgagcaggtggtcgaagggtggtggagaggataggaaggcagtgctgagcgggcagggttctggatccttcttgtccatctgtctctgagcttttgcttatatctgagagggatagagggagggaaagagagaaagaagggatagagggagagaggaagggagaaaacagacaatcgacatcacatgctacactactaactcattcaaaaatagcattgtgccattgctatttcccatgtatgtcattagatattccatgaaaacttgatttctaatcgttatataatattcaaatgtgttaataggttaccctctgcttaaccatttccctgttttagacatgtgtgttgcttctgatacttcatcattcattcatttatcaaatatttatcagcaatgatgattctccagacattaacataagtaagtagggtgtggattttcttatatataaatttttgacatgcctgcatatatgtgcttccataactatatagaatttggtatttttgctcttgctgctaattgctggacttctttagtgaaagattacctgttctggaaagcctgctaatttagatggtaggttggattgaaatctgtgcaaatgatgagcttatctgtttcggggaacataattggagttctggacacactctctcccaggattataggtatgagattaataggcattgttttgatggcatatgccacaagcatcaaaatatccactttgtgaccttcaggcttaaagggatcatcttgaaggtatagctttacatgttgcctagtttagaggtagatgaggctgtagataatgtccactccaacctgtgcagaaggatctgagaggcagccccaggggttgctgtaagacttggtgttgctgactccccttagaagtaatctccaaacaccaccaccaccaccacgaagtgtgtcatcatataaactgaagatagctgagattacacactgcctaaatttcactcagaaaaacatgatagagatcatttctgattgaaaaggcaataaagaaactcctaaacatacctctttgtccataaatggaaaccagacaaatcaggcttgtagatttaaagagaccctgcaaggtggcgattctgaaataccccttggaaggaccatgccaagtctgaagtgaagctgcagagtgaagcagtatccagagactgagctatttctggctgcagactttgtgtcatgaaatggtgataatttccccacgccccataatgttcctctccttcctgatggctctataagtttgagtgatgtcagtctgtttggaggcagctaggtttgcttgtgtcttaggacagatgtccagaaaaaacaaggctagaccctgaagagcctggacatccattagaatgacaaaagactctgtggatacaaaataccattagtttttcttccttcctctatattctctctttttatctccttccctgatagcaagcaaagggtagggaaatctaagtaggaggcttctatccttgactgatttttttttaaatttttctgcctcctaggggatcacttaattcattttatgcctctggaagagaccagaatttcctcactcctccaaattcctgggcaggttacctctcccaacctcagttcatcattattctgcactgagttatgtaatgatttgatcgtgttgaggagtaattcacctttgttcccacctacgttaagactgattacaaatcctcataaaatactgattatgctaccaaaaatgttcttaaggatagtctgttaggaaggaggtaatgctgctgctcagaagtgtgggcttctgtctaattatgtgtaaattatctgagtggaatctcaaatgtttagtgataaacagtttgatgcgtcccagcaaagtatctagtttgtgaggcaatataatcaaaagcagcttatgtgcagcaaatcgtagatggtataactttgcgtctttttcaagttatttttacagaaagaaatgagaatttgtctgcagccctttaagaatagcaaacgttgtattttgcattttttaaagaaagataattgatcctttgactatactgctgttctgttctcagaagaaacattaaaaagttggatttcttaagaaatgcaattaaccgacttttatttaatgattttttttcacgttattcatcctggaggaatggtttctgttggttattatcaaagatgaggatggattttcagaagcaaaatatcatgatattctactgcaatgcatctgtggttactcagggaagatccaatgtggtttgtatgtagatatctccttctttagaaaacctttcctgaattgcctacctccatctcccacccatctccagctggaatgttgtacattctctgtgccaccagaagaaagctattctaataatcaaagcgaataggacaccatttaattgggatgaagccacaattgttagtgtagctagtggtaattgaacctagatgttcataatctaggatcctaaactagatgttctgataatctagatcttcataaaatacaggtatttaagtctgaaagctcattatttcttagtctcagtggtagggttccttaaaggcccaagaagcttgagagaagtctaccagggcggatacccatcgaaaaatcaaagccaaggacttctataggcacagaatggtcaagatatttattcagcatagcatgaggaagtttagtccagtatagaaaacaggaatatcagttaaaatgaaattagcatattagttaacataagaattcccacgtcagtgtttgagaacactttgcagctcttctagagacattcttattacagaagaagatgactaactcagaagaaaaagggtatgaaagtctagtaggagaaaatgattagcaaaaaaaaaaaaaaggtactaagacattaatattttattgaaaagaggcaagaattctgtcagttccttattggtggtcaatgcagaataatgctagcattgcctatcattcagttgattccgtaggcggctaaattggttgcttaatgaatccatagtggtatttggctccgcttggtttccaaaattgtaaggtaaattctgtgcacgtggttttaagttggaaatggttgatatggttatacttggtgtatgcattcaacaaattaaccagttgcaaatgtgtgcctattcacaaaccccttgattgaattgcaagtataccagctaattagacatgtgttccgtaatgcttaaagagagatcaaacctccttcagtgtctctagatggtgaagtcttaaatttacccaagatcaaaatatctacataaagattcctatgtatatctgacatgtgcaagccagagggtgttggacattttgaaggccaaccatttagatgattgactaaatatatttactttcatcatacagatctgtccaatattaccagcataccttttaagaaagtgtattcatccttttagagttcattaaaatttatcatgactgtctgtgggatgcatttatttcatattgacttctgtttgtatcctttcctatcctacattctctataaccagtctttttgcaagtctgcaattcatatcaaaaagtctgaaggaattttatttttatttccttttcagtgaaaacatattacaaattgccaactcatgatgtattcagtttgaacttaaaatatcatttgtttaaaaaatgcaataaaacctgatatgtacactgatattcattctgaagattaaagctgccaatgaattatggagctgggccaaggctgtcttgttctcagcctaaatttatcttgtcgaaagggaattattctgaccggggctagagagtgaagatagttaaaatttgattgttcgattgctttcttctggcttttttttccttcttaaaaaatatttgattatatttctcttaagagctggattttaaaatctaaaaactgatgacggatggataaaaagtcctattttatctaattctaaaagtgacgtaggtttctggagactcttttttttttttaatgtacattttctctttccttttctttctttcttttttttttaaacatggatctttggccatgggggaccccatgctgagtgcctaccctctctgacttacacagaggaagcttcagtgtaatagaaataaatgctgcattttctctgtttataacatgtcacttgggcaaagtggtacagtgtctctttggtaaagctgaaatgcggatttctcagaaatgtcttgttttcagttaatgatattttctgcttttcaccaggtggtctctttggggctttgctcttgaattcatttctctgtgcgtaagccaggctttctgttactcgtttattcagccggcatttactgagtcctcaccacactcaggcctgagcgcagcgtccaggttgcagtggccacggaaaccagccctgtcctattggtgcttgctggctttggggtaaagtgacaggctgatactatattatagccagggccacgttagacatcaaaataaaatgttctgggaatagagaggagggatggcctggcatggaggtgagctgggggaatcaggctatctatggtcacatcattctatgaactagcagaccaggcataatgggcgacgtaagctcgccctggtgttgcctgacctgaatgagtgcttctctggaaagagctcatagttcctctttctcttatgtgaaatcccacaaggaaaggcaacttccagaaatggccaagctttctatccctaaagagccagccctcaaggactcatgaaggctgaaagggaaattgatcattggctcattatggtcctgatcaggtatgacctttgagaaaccagtgggcctggtaacaatagggcagccaagttggccatatcagcagatgttgcatttgctgactccatggccagcgccacatcacctgctctgaaggtgtttggttcccgctgcgattggatctgtattcaaaacagattgtgcctgctatggaaagagagccagcttctgaatcctggctgagtttgacttcgttgaccacagagtcttggttctttgcaaacgcaaaggaaaacacgatgtacaccttgactaaattcagctgttttcctcatccattcagccttgccttcattgcaaaatgagcaagcttgtgtttcagagggcttaggtcacttccccagcttcacttagatctgggtgttctgccttccagaatagagtccttcttctccctccatagaccctaagactattaacagtaggtcatccccaacctgttggttaagaaagacatgcacagtatctgcacaatgtccaagggatccccaggatcacctcacctttgtccaaagagaataataaggtgttggtagataagagggaggcccatgtgcctctgccattaggtcctgtgacagggagtccacatggagatcatcatgtgataaagaccactagggctgtagtccagggacaagcttgagtgacatctcagtggggccgctaccttcggagagctccgcacataaggacagagtggctggggcagtcaactggcatcctagaacatatttctcaagaggggccctgctgacgttttggaccagattgatagttcattgatatgagttttatccattgtaggatgtttggcaaaatccctggcctttccccatgagacactagtaacaccctttcctctgggagtcaaaacattgtccagtatcccctggggtgcaaaatcacccactgcttgagaaccgctatcctatggccatatttgtactcactaaagaaagggtacataatggcagctactctgggcctcttgaatcaattgcatgtgattccctacctacctccctccctccctccctccctccctccctccctccttccttccttccttccttccttccttccgagacagagtgagtctccttcacccaggctgaagtgcagtggcacagtcttggctcactgcaacctctgcctcctgggttcaagcaactctcctgcctcagcctcctgaatagctgggattacaggtgtgtgccaccacacctggctaatttttatatttttagtagagatggggcttcactgtgttggccaagctggtctcagactcctgaacttaagtgatctgcctgtcccagcctcccacagtgttgggactacaggcgtgagccaccgtgcccagtgcaattgcatgtgtatttaatgagcttctgcttggggggtagtttagcatacatttggaggcagatgggctgcttcccttattgtatgagagccaggtgactttgtgcaaaacacttgcctgctttgtactttagtcctctcttctataaaacacagatagttctaacactgtatatctctcccaagtttgtagtgaaaaaggattgcacacatacacacacaaagagaccattatgtaagtgttaactactattcttattagcattgtctgggcacaatatctggtgttggaagtcagagaaaatacacagcatgttcttttcttcatggggttctagtctagatgagaagacagtgtccagccactgagagcaatatgcaaatcagtcatcataaactgagtgactgttaggagagagtctattgagggaaacgtgggttatttatagtttgcttgagtttgaatccaggagacaatcttgacttcctctctgcagaccaaaataatctttctttctctcttttcctccctgccttcctttcttttcttttccttttatttttgttttcttttcctagaaaaggtcttactctgtcacccaggatggacaggaggtcagtggcacaattatagctcactgcaacctctacctcctgggctccagcaatcctcccacctcagcgtccggagtagctgggaccacaggcgcgtgccatcacgcctggcaatttttttttgtattttttgtagagacagggtttctatttgttgcccaagctcaactcctgagctcaggtgatccacccacttcagcctcccagagtgctgggattacaggtgtgagccactgtacctggccgactaaagcgatgtctgaaaagggaggacagaatccaccactcaccgccccaaacccattttctttgcagcgtttgctcagactaacagtcagaggaacaagtaaatggcatttgcaaaggggatttcatttattcctggatgccacagttacttgttcacccccaactcattgcaaggcacagggtcttaggaattctttaattgtaaggaacagaaactcaccctgtatgaagatatctcattataagaatcaaaagatatttcacaaaactcagttgcatgaaatatggggaaatacatggatattagaagttatcaggtggattttctgctgccttttgctcttgcaccctctccctggagccttctgctctctgttctctggttgattaagcttttttttttcctgttatcgttcttttaaaaaatttttccataggttattgggggaacaggtggtgtttgatttcataagttcttcagtggtgatttgtgagatttgggtgcacccatcacctgagcagtatacactgcacccagtttgtaggcttttacccctcacctccttcccaccctttctccctgagtccccaaagtccactgtgtcattcttatgcctttgcattctcatagcttagctcccacttatgagtgagaacatatgatgtttggttttccattcctgagttacttcacttagaataatagtctccaatcgcatccaggttgctgcaactgcgattaattcattacttttttatggttgagtagtccatcatgtgtgtgtgtttgtgtatctgtgtgtgtgtatctcacagtttcttcaatgcactcattggtttatggatgggttggttccacatttttgcaattgtgaattgtgctgctataaatatgcatgtgcaggtatcttttttgtataacgactttttttcctctgggtagatacccagtagtgggattgttggatcaaatggtagttctacatttaggtctttaaggaatctccacatgattttccatagtggtgggttaagcattttgactttgtgtgcctctctctgcttgtctctctctgttcgttcatcccctagtgcttggtccagctttcagttttccatggccttcctccctggtcccccaatctgcctctgcagtctctatactccaatccagcattcctgacagggagaagatctcattgaaccagcatggatcagtgtccaccatgagttcccacagttggaaagatttaggggagctcactaggtagatgatggtgcctcttccgtggtggaaaggagtatgaatttgctaagaaaatcgtatgggtggaggaaattggttgacacttccataacacctcccctctgtgttggccagggaaacacccttgacattctgtatctccatcccctagatcgcctctccctaaacaccactcagcctcaccgtcctcagaagctgtatccttactcagttttctttaattggcatcttctaaaataagactctcatattgttgcttcttagggtcacccagagcttgccagaagtgagaaaggatctcttctggacttgatctagatcatgtcatcagatcattgcatcaaagtcaggtttactgaggcataatttacacacggtaaaatgtactcattttagcacacagttcttcaagtttcaataagtgcatacagtgatgtaataaccaccagcgtccgcatgatttggagcatattcgtcattccaaaaacttgcctagggcctagttatagttagtccccagctctagatcctgggaattggcagtctcttttctgtctctacagtgttggtgtctccagaatgtcctacaaatggaatcagaagtacgtagcctttaggcctgactatctctgtgtaatggatttgagattcatccaggtagttgcatctatcaacagttccttcttcccttttattgctgagtagcattctgtggtacagatgcactatagtttattcactagttgaagggcggttgtgttgtttccagtttttgctgattatgaaacagttgctgtaagcatttatgtacaggtaattctgtataacaattcttagttctcctgggtaaattcctaggagtggtgttgctggattgagaagtatgtttatgtttaactttattcattcatttaagatatagactcctgctctgtatcccaggctgtagtacggtggcactatcacagctcactgcagccttgaaatcttgggcacaagcagtcctcccacctcagcctcctgagtagctgggaccacaggcactcaccaccacgcctggttaattttttaacttcttgtagagatgaggtcctgctatattgtccagattgatctcgatctcctggcctcaagcagtcctcccaccttagcctcccacagtgctaggatgacaggcataagccaccactcctggccctttttaacttcataaagatgttttttaagagaggcagaggacagagtggtagtttcggtgtttaatcctggatctgatacttcctagctctgcgacctcacggtttatctgtgccttactggattgcagcagaattaatggcaaaataataactctgcacaagttcagggcagtcactggctgagtgttagagctttaagatggcccctcatcttttggccactgccttcttgtactggatgttccttctttattgcctgagcatgcacactctttcttacatccttgccacacactgtttccttttctggaacattttcccacccacctttctcctcgccaacgcctcatccctccgttgcccaatggaatgccgcctcttcagaaaagccttccctcaccctcagtctcaatccagccctttgctatctatagattccttacttttttttttttttttttttttttttttttagcaacctgttcttatcctttatagcatttaccacaatgggcctcagaaaattaactgtataatttgatttttaattggaatttttattgagataattgcagattcacatgcagctgtaaggaataatacagagagttccaatgtaccctttacacagttttccccaatggtaacatttggcaaaattaaagtacagtgatcacatctaggatattgatgttggtacaacccagtgattttattcaaatttccccaatgttacttgcattaattgtgtgtgtgtgtgtgtgtgtgtgtgtttgcagtggtggtagttttatctggttttgtagaattttaccgcacatgtaggtctgtgcatccaacaccacagtcaggataacaaacatttccatcaccactggatcccttctgtttttctttttacaaccacccccgcccccactcccaattcctaatttctggcaaacactaattttctctctatttataagcttggacatttcaagaaatggacccatatagtacctgacttttaggcattgacattttttgatcaacgtaattccctggagactcattgaaactgctgtgtgtataaataacttattccttttcattgctgtgtagtattccatggtatggatgtaccacagtttgtttaaccattcatctattgatggacatctggactaactcctggatttagctcttataaataaaactgttacaaatcttcaagtgcagggttttgtgtgaacacaagattccatttctctgagataagggctcaagaaagaacatgctgggacatgatttttaagagaaactgattgatttttaaactgagtctctgctgatagacttttagttccatccgggtaagtagactgagttttgtttgtttgtctgcttgtttgtatctttaatcagcatactgggaacactgtacaattcttagaacataatttaccactctataaatatttatagatgatttaaataaggaacgaatgagtgaatgcatgaataccactgctggcatagggattaaatgaaataatttatgtaaatcatgttcagaatgtctagcatggagtaagctctaataggtaaacacttgtagcacaatcgccattgtaagatatgattttggttgaaggtgacatgaggaaatttcatatccttccaccttcagcatcatacaaacatcatgtggctttgcaggatcccaagggtctaggttcttgccactttatttctttaaataaaagcctatcttgtgaaaatgctcaaaagtgtcagagtgggaatttgggtttcatactttgatactttcttatttttttttttttttttttgagatggagtcttgctctgtcacctaggctggagtacagtgatgccatctcagctcactgcagcctcccctgccaggttcaagcaactttccctgcctcagcctcctgaatagctggaatttcaggagcacaccaccaggactggctaatttttttttttttttttttttttttgagacagagtcttactctgtcacccaggatggagtgcagtggcgagatctcgggtcactgcaagctccgcctcctgggtacccaccattctcccgcctcagcctcccgagtagctgggactacaggtccctgccaccatgcctggctaattttgtttttgtatttttagtagagacagggtttagccatgttggccaggctggtctcaaactcctgacctcagatgatccacccgcctcagcctcccagagtgctgggattacaggcatgagtcaccatgcctggccctgggcttcaaactttaaagaagatactgcttaaataggtcagggtgaagctacataaccacttgcctcattgaacatgaacgcaggcaatgcgtgatagaagctgtaggagtgtgaggatgtgtggcacaaaagaggttaactttgttccaagatcattatggtcccagagtgtgacataaatattggtgaagccaatggagttagcacagtacttaatagagagagaagattagtgattctcatttgcctgaggaaagtgcaggtcttgataatgtcttgatctatgtacaaagagctagtaaagacaagcagtcctcataataaaaatagaaatgaggttttcccgacaaagatgccaccagaatgatgagctgtcacacaggacctggagagacaagaaagaaacttctttggtgactataattaggattccatggagagcagcagtgtgcaggaactatgccagggtgctctctttctctttctagaatcaccatcaaacttgctctaaaggaccaggacagcgagtaggtgcaagctgatccttggtggaccaagcctgtattccccacaggccatggtgaggctctgacctggggtataataggcaagaagtgttttcagtctgtgacttgggctacttaaatggaagaagataaaaccttttatttttccttataatgaaagtacttcacgctcattattaaaaacttggattgattgacaattttgaaaaatgataaaagtcgcctctcaacaccacatttgggtgtttcctcaaagctttgaaaatatctatgtagatctatatgtttagatttagaaagagataaatttagaagtggagaacacaaattagtttatgatagattttacatatatggggtattacccaataattatggatttgcatattaccttcccccacccatttcgtgtgcatttttctgcttcttaagctgtttttccctcggtgtattttcaaaatacacatagtttgtgaggatctagcccaaatgaaatgagtgatgtgtgactggctgttgaacgaaaaatccaaaccaatctcgtgtgtatttgctggctgagatctgttttcctcatgttctgtagaagggaaggagtaacatggtctcctttagatgctggatcaaggtctgagatttttctaccttcaccctggtttccatataacagggaaatcctagagtggtttaagatacccacaagcaccctggggaagcggcacctacctcaaccatagtttgtgatcctgtaattcaatttaatttctggagaaagaatccactctcagagaactctcacatcaattgttcaactttcagacattctacttggaaatccatttaaggaatgcatcatacaataaagtagaagattcaaggtgagaaaatcacactcatctgagttagggcctcagggtgtacatttaaataagttatttatcttccctcattctcagcttccttacctgtgaaatgggaggagtcacatcaccttgcttatcagatttctgggaagatgaaataagataatgaatgtaaaacccttggcatagtgtctacacacagtaaatgctaagtaattcttaactgtgctattactggccggagagcagtggctcacacctataaccccagtactttgggaggctgagctgggcagatcacttgaggtcaggagttcgagaccagcctggccaacatggtgaaatgccatctctactaaaaatactaaaattagccaggcatgatggcacatgccaataatcccggctacattggaggctgaggcaggagaatcacttgaacccaggggatggaggttacagtgagctgagagggcaccactgcactccagcctgcgcgataaagcaaggctccatctcaaaaactttgttgttactttttacagtatttcttggacttgtgtgtgcttcttgataggacattggctatgcaggggaacaacattggaatcgtttgtctggtgagaggcaggggttggagaaaagaaagtgacagcctgctgagaatctgagtgatattagaggaagtatgggcaccctggaggttagtgttttcactaaaaagatcataaattattaacatccaacagagttacccagaagaacactcatgccagatcctgcctgctgtatcagagagcctccttagagatgtctgtggctgagttacaaagaagaaaaagcagtcagggtgatgatgggtattacatttgcttccttagtcaaacactagagttgagagagaaagcaagattggaagtagcaatgggctctccttagaaagattaaagagatggctccctttgtttctagcctaagagaacagggctggctgtctttcccacaaaggtcaatgtacattgccttacttttgtgtttacaatcaacagtagccagattatcattaccgataccaacattaccaccaccattatcatcatcaccatcaccatcatcattaccatcatcatcagcaagagcatcactgtcaccaccattatgattatcatcatcgttattacagtcaccttcatcgtcatcatcaccattatcaccatcagcatcaatatgataatgatgatcatcatgattatcagtgccatcattactaccatcactttcatcatagtcatcaccatcatcatcaccatgatcatgatcatcatcagcatcaccacccccaccatcatcattatcacaattatccttgaagctgatatgtgttgtgcacttcctaggtgctaaggggttgcaccaagaaatttagtgtattagtccatgctatcaaatttagtcttgtgagataaaaatattagtgcttgtctcacttataaataaggatccaagactcaggaagttttaaataacttgccaaaagccactcagctagtatgctgtagttcaaagattcagaaccaggaggtctgcctccctagtccttatcatccatttcgttatcaagaaggcaggacaaggttaggataaactctgtggccccagaataagctcttttaattcttattatttttcttcataggagagtaaacctataatctgtgcttcccagggttacatggcacaccactgtttctcagatacctacgtacatttacaccggtagaaaccattttagaaataaatgttacagaaaattccatctataagagagataaaaggagcaggataaaagatgcattttatgacttcaaatgtgaagcatgtatcgtaaaggcaattagtgagaaaatgaggctattttgatgaacaccaatatttgaaattgggagtatggatagataatattgttttcaattaggcttataatccaattcatttcagtcttttaatttgttgcctgctattgagaagatgctggttcacacactgatactgagatgcagaaggtaattttttaaccaggtgaccttaaaatatctcattaatctggaatgtaagctccatgtcctttcgtagttgagcactgtatctccaaggccagcaccatgcttcgcacagacactattttcaaaaggtagctgacgattgaataaatgaattaaccaactagtaaattaaatgaatctcagaaacatgaaaatggaagaggactaatattttcattttcaaatttgctcattcactcaactaatatttaacaagcatccactacagtaagccaagtgctgttctaaggtggtgagcatgcaacattaagaggggaaaaataccgttctcatgggacatgtgcgtgtccgtgtgtacaggatgggggcgtggaagatagacagaaaatagacaaggaactcaccattaacactcgctgtaatgtttagaagcagacagcttatctaagccttctgagtctcagcatgcttgtgggtaatgtagtattatcggtatgtacccagcaatacccctgtgaagaataaacagaaacacacagaggtgctatcatccttgcctccatctcaatattgcaaaacatacaagaatgcacatttcattctgtgattatttatttaactaggcactgggcattctgggatttgtacattcatatcattaaagcagtttcagccaaagagcatatatttggagatgttttaacatgcactgggcataagtgattatagccctaggttcaaggtgaccagtatctggacagagggagatatgtagaagaagtaccagttacgttgcaaggtaagatgtgcagaaccagcttaaagcattcaatactgtgccctaaccagctgaaggggtcattgatgccctttgaacagaagacagacatccttagttttgggtatttaaaattcctctgtggcaccaatgtgaggtatgagttgggaagagctgagactgagagcaaaggaacttacctaagtatagctttttcccccttttctaaaaatctaggctaaataaaataatgtgatgtgctagtatagccacaatggaaaattaagacagccttaatagttgggagatggaagagttaaaaatgatacaatttgggaaccaattgactattcagagcagcaaaggaagatgtgaagggcaaatgttcagctttcaagattaagtaaatggaagggaggtgcttccattaacaaacaggtaagtcaatagaggaagagcagcatgtgcagatgcgtttgtttgggggaatgttaaaatagcagcaaggatgggaccttggcactgagacatgcaggaggctgtctgaagttcatgatgattcctgagatgcagcctgtgaggagaggtcatggctagggatgcgataaggatttgtctgtattctgcaaagagtctgatgcaatggctttcaatcattactgcaaatccttcacaagtgtgtaaagagtatcatagccattactatattactatatataaaatatataatgtactatataatgtattatatataatatataatgtattttatatattatatattatgtatataatatataatatattttatatataatatagaatatatgatgtattatatgtattatatattgtatatattatattatacaattatagtatatattacatattgtatatattatatatagaatatatgatgtataatatataatatatcatgtattatgtataatatataatatataatgtattacgtatgatatataatatagaacgtattatatatcatatatcatatatgatatagaacgtattatatatcatatatatgatatatgatatagaacgtattatatatcatatatatgatatatgatatagaacgtattatatatcatatatcatatatgatatatgatatatgacgtattatatatcatatatcatacatgatatatataatatataatgtattatgttatatatcatatatgatatacatgatatataatatgtaatgtattatattatatatataaggtattatatataatatataatatgtaatgtattatatataatatataatgtattatataatatgtattatgtattatatataaaatatatataatactatatgtatacacacacacacacacacacacaaatatataacagaagtgggttgtgcacggtgatgacgattagggtataggaggtaagagacctaacaaagcacgaagtgatgccaagcgagagttttttgtctatgaggcatgtaagaacgctacaatacatgtgcattaaaaagtccagccagggacatatatagtctttttcttacatgtcactctactgaaatagtcttgaattattttatctgatacgaggtgaaggaaatgctatgttttcatcagtaagcacaataggtcttgtaatggagcgtacaggtttggtttggaaagatggcttgatacaaagctggataagagatgatcccctcaaagacacagaaacaactgttgccgagcttttaaggagcaggaaacagaggatgaaggggtgaggatacgaatttgttctctggctctcaaaaagaaaagagggaagaggaaaaggaagtaaggcagagaaagtctggaaccaagacagtttaatcaaagtcgagggcactagaatagccaaatgtcattttcaaggatgtgatagataccgttgaccctccacgtccttgggttctgcatccatagattcagtcaactgcagatcaaaaatattcagaaagaaattgtgtctgtgctaaacatgtgcagacacttttttccttgtcattattccctaaacaatgcattgaaacaactatttacatggaatttgcattgtattagtaaacctagaagatgatttaaagtatacaggaggatatgtgtaggttataagcaaatactacacatctgtagattttggtgtccttggaaggtcctagaaccaatcacccatggatagtgaacgatgactctaccgatccttgtctgtgtttttaaaatgagaatcacatcttccattctctctgccaccatcttcatgtctgctcatacatgcatcatttagtgggtgtattgcagaatgggctaattaattttatgtgtgggtctttgtaatggaacccagagacagggaatataagaacctggactcgcaggccagatgaggttgtgagaacatgagctgcctgtaaccgtgaattgcaatttggggactaaaacttggaatcctagagattgtctgtttgccgaggtgagatttttgagagccaggaaggttttctacccaatacccgatacatccccagtgtcaccttgtaagttttgcagataaacctagtttcgtatgattccttacatcgttcctagctcacctccaacaatcatcagactttgaaggtatgcaatgatgccagggactaagaattcctggggtgtctttgacctgtgttccaggatgagaccctgggaaggtccaggtcaaggtggattaattcagagctggagatgttagaggtgaagtcacttctagtcagaaatgcttaatgacaactcatcttgtactttaaagataaaatttctgagcatttctggggtcaaagaaccttgcagccaagctcatgaaagaggaaaaagagaatcttctgcaggctttgtttgccttcaggtttgcttgagtttaatccagaagtcgaaacacagagagtgggtggggtggagggttcccaaagtagaccttcccacccacttgttcattaggagaaatcaccacttagctgtttttgtctctgccgcctacccttccttgtcccacgcacttacattcagtcctgtgcactggaaacagactcccaccctctcaactgccaaacgctgcaccttgtctttgcttcacctcctggagtccattgtttcaggaaggctgctataggaactgaagttacttgcttgctctgggtaccttttaatttggggttctacctggtgtgtctcgggtctcttttgacatatgtcagttggctgctctgatagaacattgtctccataaattgtcacttttgccagaaatgatgataggaaagtgttggcaagaaaaaaaaaaaaaaagactgaagcagaatattttcttttgaaaagcttagggcaagctgtggatagggtgggacttactcctgctctaattgagtaaggacaagaaagctaggaaaatttcatatgataaaattaggtggctggggtcagcgatatattcctggaaaaagaaagcttgaagataaaatggcatagagtagttcttcacaaaagtgcttacgaggtttagatattgtaaaaaatgatgaatatgatgatgatgatgatgatgatgatgacagtggtgattttgtaagcagcatctctactgctgtttgtattgcatggttaaaaaggatactttctcattttgttcaacagaccagaaaaccctgttttccatctcttattagaaggataagatagatacttcttgtgccctcagtttcttcttatgtaaattggaactataaaaataatctaccttgcaggattttgtgaagatcagaaaaaaattaattaccatctggccagaagtaattttctaacatgtattacgcttgtcagtcttcacaaaatagtgaaggacttgacctgatgttgtgtgagatacagttggtgaagattttagttgacaagggttaatgtgtaagctggcattcatttgattcattagcaaggttaaataaattgtgtactcagaagaccagggcagaaaggtgatgtgtatgatgtctatacatttttgtatagtgccatgtcatttaaaaaaactttacaaaaagaaaattgtatctgaagttagtccttccataaatgtattgactttgttggtctcgtttgtgtaatttttttgcaaagaaggaggaatgatggtttcatcaactggtcaggggctgaaaatagaaatacctcataataatagttgctatatattgagtggttgctagataatgggcaccatttttatgacttatatatattacatgattttatctttcaacaacttaggaaggaaaagtatcattattctccttagaatgaaactgaggttttaagaacttgtatgtcagtagacatataatagcagctgcaaaggtatgatccagagatagatcttcagaccaagcagcaagactccaaaaggtgtactgctcactacaggtgtactcaggggagtacaccttttgcagtctcgctgtttgtgtttgaggcatacccacatatgaaccagaaagagttcccaaataccccatcgcaactccatatttcaggtggccttgaacgagcagggctgagtcattgaggaacaagaataaactctggtgatccaacaaattcaattcatttgacctttattaagcctctcctaagtgaaaggcatgctgctctgtggttcaggaaactcagaaatgagaagggtgtttggtttggtttgctgcagtgaacctgtgggggtaaagagaatagttattcaagcctaaagagtgtaactattaattgttttttagtctcctcgtgatagctaacaagtattgttgatacttgttgtgccagtgcctatgctgagaagcactttacattcattatctcggtggttcccaaatgccgatccacagactcattggattctgtaatgacattttcgacagactgcagctaaatgagaaaattaagggcaatttagtgaaaattttaatagacttaaatttaatcaatttgaaggactgtcctttattttcagattatgtcctcctttttttttttttttttgcattttcgtgtaaaatgctgtttcttttattaaatgcttatgacagtagacagtgtatgtgagtttatgtgtgtatgtatgaatgtactaccttggcaagaaatttaaaagctgttaattttcatgcagtctctttaccatttttaaacttttcttggaactgtccatgtcattgagggctaggggataagaagtctgagaatcattatagttctgtaagggtgctaccattggccccattttacagatgaaaaaaactaaggctcggaatggttagctcacatgctcatgttcacgatagcttgcaagtagcagagcttgaatttaaaccagtttgtgtgtttctgtagatgcagaacacctgcatgatgggcatatggctgcttttgctgcaatgaataggctccctagcctgtccctggccatggatgtgggccatgcaaccgttttcagagtcccaggactctgggcctttctttcgggtgcagactgaaatccacaatagctttagacattcatggtgtttcctaggagctagtttgcagcagttctattcctctacttggaggaatacaggagttaagagcctagctttgtgtcccttccctctgcccctgagtcctgtgtttctgtttaccctcaaaaatgtgagcagtataggtatgtgtaaaggtaaatgcagacatcctgcttagtggcttacagcagaacctcatgtcaggggaagagctgggttgaaagatcccgttttccaagcttgcactccatgggagccatagtcagtagccagtgagacgacaggaggagagacaaggctcaagggtcaagggagaagacactgtctgtacctcctgagctttctcttcattgtgcctgcagggaggagggaaggcagtttgggccatggcttgtaggaacaaaaaaggacaaacttattttccacatcttcctgctttatatgtgaggcttgatgtaaagacaaactaccccaccctgtgagatgggtaattgagaatgagacataactgggtttggaaatcagttgcatcccttctcttctccagaaacatatgcaggtttccaacctggcagtctgtttctcagcagccttggcacctgaggaaggggtaagatgaggatctgggtatttttattttgatttctgacattgtccctaagaagttatgctgtaaacggataagagattctgggttactgaaatcctgtatggatgctaaggtgctatgtagcttagtccattcccttttttgttgtggatgttaattatctagaatattgcaactcagtagtggctttaagcaggttttcatgtactagccagggaaagttaccaccattaaaaaaaattattctttaggaacgtgtagcctggggtctttataataacaacagttgtagtagtagttgtagtagcaatgatgataatataactgtttcattttattgtaaaagtaatacacagacacattcttattgtgaaaatctaagcgacataaatctgtacagagtaaaaattgaaatcccccccaatagcccctcctctattaccctagatctaaaagcatttattggattgatttatttgtttccgggcccttttgtatgcacttcacatgactgcatgtatgcctattttacgcacatgcatatgcacatacttctgtggatgtctatatgcatccacacacatgtttttaaagaatcgtagagttttgctgtttgttttggtttgatttttcacatgtgaaattttgttatctatatcctgaaacttcttagagaattttcttagagatttttccaaggaaagacactcagatgccccgcattctttttaactggtgcattgcatgcatgtcctgtaccttgttttatttatcccctgtttcccctattgctgtttattatagttgacccttcagcaacatgggggttagaagcatcaacccaccacaatgtagaaaatttgtgtataggtttttttttgtttttttttttttttttttttgagatatactcactcttttgcccaggctctggagtgcagtagcatgatctcagcctaccgcagcctccgcctcctgggttcaagtgattctcatgcgtctgcctcccaagtagctgggactacagatgcgtgcgactatgcctgagggctaatttttgtatatttggttgagagagggtttcaccatcttggccagtctcatcttgaactcctgtccttaagtgatccactcgccttggcctcccaaagtgccgggattacaggcatgagccaacatgcccagcccaaaatttgtgtataagttttgattcccccaaaactatgattagcccactatcgactcaaagccaacagtggattaaaacgtattttgtatgttacatgcattatatatgtattcctacaataaactaagctagggtaaagaaaatattaagaaaatcataacgaagagaaaacatatttactattgatcaagtagaagtgaatcatcataaatgttttcatctttgtcattttacatgaggtaggctgaggaggaggaggaggacgaggaagacaaggggttggtcttgctatctctgggtctctcaggtggcagagaatttctgcatatgtggtcctgtatagttcaaatctgtgttgttcacgagtcaactgtatttgcttttacaagcaatggtggagtgaatatcctggtttatgtatcatgtatctacctcaaatatttcagcaggacagatatctagaattagaatagttactttgaaagatgtgcgtattttagattttgatagtgagcaccaaaatattaatatcatctccaggactgtaccagttttgactcccaccatctgtgtttcaggttacccatttctccacagtgatgtcaaatctatatattattgataggcattttattcgttatttgattttatttgttaactgatgtcagtcttttaggcaaaagatggccgtaaactgttctaaaccaccaatgtaactttgaaaagctcatttgtagtgggagcgagttgtgaactgggtattgcctgcgcttgtatttctgctcttggaagcgtggtttatttttagtcctggactcactgacaacccacacccaaactagaaagctagaggagtttgagggtcctttacacagaatcaggctctaatctcgatcctgtcattacatgcaaagcaattgctgctgaatggttggaattggttctgcctgggacgaagccctttactctgaaaaaggagcgctgtgctcatttgagcactgccaaaatcctggaccctctgactcagtgtggagtgatcgtgcttttgcctagagaaactgtgtctgagaaatggagcttctgcaaaatacagctcagagggaccatcaggggttgagacattctagaggccaacaggccagcttaatgtatacattagaagtgccaaacttctcacccctatccctagtagattgacccaagagaactacagaattcatgtagacatgctcctcagtttacaatggggttatgtcctaataaacccattgtaagttgaaaatatcataagtagaaattatgttttcgacataggatattttcaccttaccatggatttatccagatgtgaccccatcgcaagtcagggaccatctgtattaaacaaatgtgaggcttatgcaataagattggaaggagcgggatgcaagaggggctttcttgaagctgaaactgcattttttcagagcaagtgtagtttttaggtagatttcactgccgtctcccttaccctggtttccctaattccctgatcttgatcttgcctgctatgcttcccacagcactcaccaccatctattgtactgtacttatttcttctctgtattacttactttctgctgcccctcccccacccactagaatgtaaactgtctaatgtcagggacctttgtttgtccggccccactgatgccgacctgggggctagaacagtgcctggaatgagatcagcactaactaaatatgattcaggtgtttgaacaagccagtgactcaaagtgcttttgatacagataaataataaagttttctaaagatactttcatgctcactttaatgaagatggagactatattgtcgtccacattaaatttggaagtgaaagtaaaatatttctaagtcacatcttgacgttgccactgagctaaccccagtatagatgattacattgaagttcaagtccttctttctgtctaactggagtcttgcttgctctgaggtatggcaactcttatagaaagtattttttttagtggaatgtctgctatttcaacagccttgggaagttataataaatagttatgaaaatgagaaaagaaaaaaatggtttccattcttcttttaaattgctggcaaagttggaagaaaaaaagttacaatattattttatgagtcaaattaaaacttgggtagttgccttctgcctaaggaagtttcatttgaagatgacattattgattgccaattttcctgcactttttcagcttcctgtggggtatgtataaccattccattaagggtccttgtagctgaaatgcaggcagggtggcccttgaatgcatatgaacccatgtgatgttgaatgtctagaatttttttttgtggagagataagagtattttctttccccacttctcccatttattgatgttggagaatcatgccagagctagtggccttgatatggctctttctcagtctcttttgagatggaattcaaatttgctatccccagatgcggtttaaaaggctggcaaagtgttgtcatcaagtgagcgatgattgtggatatgatgctaccatttgatttggggtcattggatgccctattcctgattaaggagcactgatgttatcaatggaaaagtgttcctctgggctccttaatatagttgcagtgtttatgggaaggggacttgtccctgtgtgtgattgtgtttgcatgcactggtggagagatgttcaggtttagttatccagagagcagagcccgactccaaataattttgatgtggatttaggtctggttctcatgttgtactttgcagatcttcagtgtgtctgactgtgaaaacttaagtttaagggaatgtcagagccgttattgcaagatggatctgtggggatctaatcactactgaggggttccaactttggggagaaaacggactggaaaatctgtattgccttagtgcagccaagagcatttattgggtctttacataatgtatttgtttttcattaaaccgttcagataaagtcttattaaagtgccatgtattatgtatcatgtttcttatgaaaatgagctgaaggaaaaaattctctcctcttcttgggttatttacaggcttttctaatgccagcaagagaaaaaaaaataaaggaaagcagtgcgaacccgtccgtacagcagattgcttgacgcaacagtaaagaatgggaaagggagagtgaggattggaaaggtagaatggttggccttttattccattcgtgttctgtggagtgactttctctttagttttgtgaatgcaaaaataaataaataaaggcaggtaggaagtaagagaagaaaagagggaattcttatattatttgttaatcaaagcttgtcccatgaatgtgacctctgatgcaacgtacagcaaacgtttttcaaactaaccactgccagcaccccccaataaaagcagtacagaatagcagcctctactttcccactcccctggatgaacttctgcctagggctaaagggttaaacatgctactgtgtccctgataaattgatgggatgtgtgagccccagagaggttggaggcactggttttgcaagatgaaaagtggaaagaaacagcgggttggggcctagtgttaggcagagtgaagacttcatagttatttcaaacagaacgacaacaaaaaatagagccgtgggataattagttttcttttcttcagaaagcattttgattagcctgcaaagtgagttgtgccttgcgagctgatggctgggttcagagccttcatttggctgaggatgtcggggtgagccctgaggaggaggggatatttgggatgtccctggtggccagttccagggttctgccccaaatattcttttgtgagagagcccccatcccctctcaggtacggttccgtcctgcaggtcagtgagaagctgtcagcaaggtttctttcaggaagcccaacaatcaaaaaagctgctgtttagacagctgatctcttggtctgaaaacaaaaaaaaaaaaaaagaaaatccaatcactgggtcaaaatctatattaaaaaaatatggctactcttcctgatcacgattttattgctgccaagaatgcaagaatgtgcttttttttttttttcctgtcaggaccaaggacgagttagagtcttaatattttctttcgatttgcagatcacatcctattttattgcataaagactaatgaaatctactaatgaataattattacttcataaaataaaggggaggggagacccgtttgcaagagcagaatgttaatttggccaaggagggctggacaggcaagaataaaaaaaataaataaataaaccattgtaatttgctccctgcagccgacggagtaatctcttatcagacacggacttccctaccctgtgcatttataatttgagaggagcgggtgttctgggctgggagaagcccccttccagtcgccccgagctggcacgttagtccaacaggcttgatttccacgccagcctgggcggttgctctcattgaacagctcaggggctggttcgctggctcggggctgcctgcccaaccaaggcgaggcacagagcgaaagctgcgccccaaacgcccgggggtgcatcggcgcttcggtgctctgctggggggcgcagaaacctcctcccctccctcagcccaagctccctcctgcccccagcccctaacgtctcagcactccacctcctgaggaggggaaatcccttttctgtgtttatttggcaaggaatccggcaaacgcaccgccaccaacatctaccactgtgggtcccagctgggccatcgcgctaattgtccagctcgcctgatgccgggcgcgcggggcgctcgctcgcctgctcaccggcagagggttttagcagaccgaatttaaattttggtgagtgtttttttgaaacaaacaaaaaaaataaataatttttaaaaaaagcgaaggggagggaaggaaaaaaaggaaaaaaaatctttcccctggacccatttgacaaatgaggagacagacagcatcagaaccaacggagtgagcttcagtgtgagtcaaaacctctcttcctctctttcaatctctctctctctttaccctccctctcgctctctctctctctctctctctgtctctcccctccctctctcttcctctctccctctctacctccgtcccaccccttcctcctctccctccctccctccctctcgctatccttgcccccctcccattcagcctcttcgggagggcagcgcatcccctgccccttccagagaagttccctctgccggttctcgtgtcaccttcacaggggtatggggtggggggccccttccactttccgggggatcaaaaagcaggcccaacaacccagaaaagccagacgaccgcgcgaagggaaccaactagtttccaggtccccgcaagtgttttagttggaggcagaggaacgccgggatctagcacatccccaggcggggagagccagggaggagggaccggcggggtgcggtggggggagggaggaggaaagagggggagagagacagagagagagacagagagagagagagagagagagagagagagagacagcgcgagccaccggtcattgacttagataaccagcaaaattaaaaaagaaaaaaaaaaattgtagcgcccaggcagagagcaacgtgattgcattcaagcgtccccactcgggctcggcgggcgccagagagacatgatgcagcatcctctgacgggggccacctgcgtggcgctccccaacgtgggcatgtgtccccagctttcgtgtgccttgacttttatgtacttacagcaggtaaggcgcgcgtctgccctcggtggctgctttcctggggctgggccagatgggtccccgcgcgtactgggctgcgcttcggtgccttatgtaggttctgaggagggggctcccgcgttgcgatggaaagggtggatggaagcctcctgctctctgtggagcccgggcacctcgcgctgagatgtttctgcacctgtccgaatactttaaaaccgcctgatgcccagcctgggcaccggaagtttgaaatggaaaactgccttttccttgctaccatcttccttgtgtcagtgcctttcgtggtgatctgagtctaagacccctttgatgctaagagtttgaatctttgtggaggcattccggtgcctgtagtgttaattcagctgatttaatagagagtggaaaggagaagtgtgtggtgtgtggtgtggtgtgtgtgtgtgtgtgtgtgtgtgtgtgtgtgtgtgtgtgtgttttcctaagtttgtgtggtgctatattcggtccgcatgggatcgcagcatttgaatttctggagtgtgtcagccccagtctgccttcaaactcactggcaatgctgtgaagaaggtgagctgtttaggatgttgtctttgttggcatgtgttagggtgtttgtgtgtgtgtgcgtgtgtgggtttttttttccctttcacttctccttagtggtcttgctgagggagtctgtgtttgctttattttccattcattgtgcacatttcagtcttttgacaccttactctctgtctttctcagggtgtttccttgggaccctctctgctctgtcattctttctttattggaagggttgcttcctgagttggttcctgggcttgggaaatagctcagcactgcccttgtagggtgacaggccagctctctgtcattgggcaggggcagtggatgtgaactgaagggctagaaggggttttgtcatgcagatgaaaatcctttctccctcccaggatctccatcctattctatgaaggtttacagtgattatactcattttatctgtttttccacggactcacttcaagagtaccatttgttaacatgagtgtgtgaacagaacttcctatgcaagagttgagagtggccctcttccccaagaccctcaatttcaacctgtgttaaaggaatgtatatttttataaaatgtcaggattctgttttgaacatttgggtgattttctatcaagttggttgactccagaaaatatttcttaggtgtattttctgttgcatgtctttttgagaacagtcttaaaaaaatcttgggaaccaatttgttcttttaaatattattttattacgttcattattgagtaaatcgtgccagaagacatttcccaagagagtattgataacatattatatgcttcatcttccacaatttctgtgcctttgctgtgggtgtgtgtgtaaatgtgtatgtgcatgtgcgttttataccagttatttccaccggaagaaaattctaatgagcatttctatagatgctaagcctcagttggatttatcaaattattactgagttgatcttttgccttttacatttacttctttcatgttatttattaatcaatttgaatatcatttacctagcaagtagaatgctataggtactcaatgttctccgttcctttgtgtggtggtgtttgtgtttttttcaaaaatacatccatgtttctgccttctagatttttaaattggcttactcatttgggcacaacttaggagagaagatagtgactttgagtgagaggttattcttgccatgagaagaacaaacatataagataaacacaaaggttctcagcatcttccaggcagtctctcccacgaggaaaaacacccctgctctggaaaggggaggcttgaagaaaacattggcagccacaacaaatatttagaagtgactaaatcagcatcatggttccatatgaagatagatggagggtggattttgaaatgtgctttggaatgcatctccccctcccctgaaaggacttgcactgctatctgtgaaagtgtttataatgtgatactatgacataatgtgggaatggtgtgcgtgtgtgtgtgtgtgtgtgtgtgtattttctctgagcttcactgaatacctgaagtataataaaggcagtcatttatttttgcctgtttcattcagaattaggttttctagcccttcctggaagctcaccgctagggtgtaagtgatatacctggagtcatctgtcctggccattactgtcgtgatagttcgtttaaaagtctcaagtcacttattttatttagcattccagacaatcggctgattaagagtgtgaaatagtttaatctccacatacataaatcatatcgataagtaatatcttgtacccagacaccactactatattttttatctgcctttaatctgtagctattattggatctctagctaattttggtgaacagaagggtaatctttgatctcaaagtaaattgatcaagtggacgaatcaggcaacatttatgataagtaacaccttcactgaaaacaattttattttataattgtttagaaataaacataattcagaagtctttgtcattgagatcaccaattacataagaaagtaatcaacccacattgatcttattttggagcatttatcattttgttttataaatccacaaactctgaccaccggccatcgagtcttccctgaagtatatttttctggaatgcagtttcatatggttatttcttatccaataactaaggaaaatgacttcattaaatgctttctttgtctcagcatgaacatccaacctttcctcctaaattctcacagatttatccataagacaactcataaaaacaaaaatcaattggggtgcctcagcatcggagtctactctgaatggccaagtgtaagtggcaacatatcacttttgccacgaataatttatttacttaggccaatgaagaagcaactttgatgtttacattatttgacttatcctgtttcacttatttgtatgtcccaataacttttatctagataagtgtttacttacagctacgatttcttttcttttctccttctcctcttttttcctccacatccaagatgttactacagtttagagctgcaaggtgggataatgctaaatagtttttttggcgtctagatatcagacccagtgatgtactcacataggaacacacaaatttgtatacatacacacagacacatatacacacacacctagtatagagcatatattttgtggttgtcaaccactttcagatggaacggacaagtagtccttggagcaactggcttcaatcttgctgtccagggaaagtccctgcctcaatctcctttcctgagtggcttcatgctgtgtcttctttgatggtgaatcttcttgaagctgaacttagaactcacatatccccaatacttaatcttccacgttccaaagtaagtactcatggaaccattcttgctttgaggaataattctgaatacaattccacattagggggtttgcagcaagctaggtcaaaagagaacctattttgttttcctgatagagaagaaatagaaaacagccacacacacatgcatggacacacaggacacagaaatctagagatggtttatttctattgtaagtaatagagggcaaaccttatagcacccatctcatggtaaggtatggtgaggcaacagacaggatggatgatgagattcgttttctgatgcaaactgcgtgtcagattccacccagagctgtttttttttttttccactgagtttaatgtcctgaaagaggatcagtagcatattaacttaattttctctgttcttacaccaccagcgtctctcagtactattctaagaaagcttcttatctgtcaagccctatccactgagaacctttttatcagcctaaatttaaaaatacgtcaaatgcttaaaatccacattagagggggcagaaaagagcctctaaagtgggccatgccactgtcaatattcgaagattggtaatttttcccacttaatgatgatccatgtggtttgttttaagtagtgaagtggtttgtacaaagggtaattcccagtaaatgaagccattgctcactgtggacatcttcagatcgaaagcaattgaactgaaacctgcatatcaaccctttctgtctttaattagaaagcgattctcagttcagggaatcacctggggaagatgggctctcgcgcgaaggctgcaggcgttggggagggtggccccatgcaccagccacggttataaattttggaaacattaggtaggtcataacaattatgactgtgtagaaaagttcaattctcattgcagttacttaccttgtgttactccatctgatgatttatagggggccaaatggaatttatcacattctttctttttggcttaatcccgtgttgatttattagatagtgctatggattgggggtggtcgatagtgtcagtaacgcagaaaagaattaggatagattagcttcatgtctgaattgtttaaaggaatttaagtggctggaatgagcacatttccaggcccaggtggctgcctgatagaagaaaggtccctcagtctctttctagagggatgtcttacgtcgtaaattggttaaccaatctttcttgtttctctgatcttttccgattaagagaaggcatgaaatgttaggctgttatcagccaggtaaggcccacatttcaggtgagctgggggtcatctgtgcttcccccctttggggaacctatggagggccgcgtgttgtggacatggactgcagggccacctgggctgcctctgctttaaaattacttaatccaacaatcacttctgaaaattgtaagcatctgttcatccacagaccaaagccttgtgccattcgcctgctctgcctgccattttgaggcagtttctgtgttataacatgcaactggccgctcctgcctttgcccggctggagaaagtctgtgttattagtgctcacccgccatctgttttccttacagctgacccttgagtaattctccagtagctgatggactgagggtagacagtcttttttagggttttctgattcatttaaccaggttctctgccccaagaggaaacataatgcttgtttattcatattggccgggtgaaaacagtgtagtttgtcaggcaaataatagtcctgtggaagggaacgaaattgcagcattgtaaacaaaatcaggttgctgactctgtgcctaagggggttgggtgatgagcagcacatgtcatcccgtgaaggaagcagagctgacaggtgtgggtgtaattgtcccatctgcagacccctttttaatggacggggagaagtgtcccaatgttctgtttaattcagttaagaaaagcaaagaaagttccattcatcaataaagtttcctattgccgggtgctgcccaagagaactctgccgggctgagcgttggcccgtggctgttggcatgatgcagcttgcctcacccagccctattgagggcggctgtgtcagatagggtcagctctcaggcacaatggcccagaagagccctggccctggccctttaaccatgctgaatacaggtgagctagccaaatgagcaatggacccgcaggccgcctctgctgggagacagagctggccagggttctctctgaaggatcctgaaatgcagttcctgagcctggcatacgatgaggaaagagcttgtgtggttggaatgtcctggctcctgagagggtttggggaaagaggcttttcatggttgtttctgatcttcctgtcatgctatagccctgatggattgatcccggctaaaaaagtgacagaatttggaaccagggttggtggggaggaggtagagagaaggagaagatgttgatcaaaactgtaaaaactgacgttaactgtggagcacccagagtcctgttggtatgttttatcaaaacttcatcaaggggcatacttattaacatggaaataattgtcatggtccagtatttctcaaacttcagacattcaggcaccacttcctaagtcctgccaatctacccattaccagagttgatatctacttaatattttttaaaattaacttacatattaaacatagacttgcccaaaccaaataaaacacagtcactgaatcacacctgtgatcacactttcccagcatacgtggaactaaatgtgtattcattcacctgtccatccacccattccatgttgatggaactcctgataggtttatggaactccagctgcccttctagactctcccagggagcaaagcaaaggcccctgtcctcacagatagtctgttacgttgttcatctctttgccatcttgtgaaccatgcatgcagtacaacgctttggaaaacttccgcttggcctgctggattgcctgggaatcctctgccgtgtccggtctggaattactccttccgctaccttgacccaatttgcaaggggcaaggctagagttaagttctttgtgatgcttttttttccatctgccagatcagcagccactagtgcacaataaaggaaaatagccatacattcaacgtctacatcccaaggagggctttgagatgatggagctgggactgggaaactgctgtggtccttagcactcagccaagctctagctgaagagcagtcctaccctgttttgatccttttctttatgtgtcttgaaacagaatcaaaattaggaaggggaactggagtggaaagcattcagaaggttagtgtgtgttcccagggatgcaatgactattttttttctccccttttgtggccatagaacaaagtagaagcaactgtaggatttaagtgactccaatttcccaggcctgatgagtaaatgcataaaaggtttagtcttgatgagccttttcttttttttttttttttttggcattcgatgtttgctcaggattcgcctcaatgactagattccccttatcaaaaacagtaacaaacatccccggtttttcccttccatagatcagcttcctcttgctctgcctgaagccaggcacggggcaagccctgctcttatggaaaggttgagagcaatattggtacctaaacccagaaggaacagcgaggtttacacactgcagtagccagctgtccatctcaagtgtctcacaaaattcagatgaaaaacccagatctatttagagccagttggtatcatggtatcagccttcccaaaagtacaggtttttttgaaaaacgatagtgtttctgaagttatatgtaggacagaagtcatgagctgaaggcttaatcccaactctgttattcaattagctgatccagctgaattgagcaagatagtttttttttgtttatttggggacttaattgctccttcagaaaaacagggattagaacaaccatttcatactgttctttgtgatattaagtaagatgcaaatgggaacacttagctcagtgcctggggtgcagtgagcagcctatagatgtttgataaagaaatgaaggaagggccgggcgcagtggcccacgcctgtaatcccagcactttaggaggcagaggcaggtggatcacttgaggtcaggagtttgagaccagcctggcctacatggtgaaaccctgtctctactaaaaatacaaaaattatctgagcgtggtggagcacacttgtaatcccagctacttaggaggctgaggcaggagaatcacttgaacccaggagacagaggtagcagtgagccgagatcgcggcgttgcactccagcctgggcaacaagagtgaaactctttctcaacagcagcaacaacaacaatgaaacaaaggaaggcaatatgttaaagaaacgtaggatttgtttattgaagctggacataaacttctcgtttccatttctctcaaattaacatgattaatacacccatggcctgccaaggacacagacacaagggacttgggtgtcactccgggtcttcttggttccactaccctgtttgggagctcttctctttcttcctccagtgagctgtcattcctgcttgtgtcactggattgtaatatggctacacagctcaattaatgctcagtgtcaggaggagggaaaataaaaattgtcttgctcttgtcagtagcgaagttatttactttcaaaagctgacagaatcacactgcagggccttcatttatttccattcagaacgtcattattctgtgatgccagagacttgggcacacgttgaagtttattcccataagctttaatatggcggggccctgctaaagtgtagatcgtcacccaggagagtctgggagagtctggcggagctctctgggggccccagggtgcctgggtgcttggcactgatgtctgggagggtaccctagtttcaggatggaccggggaagctgacacgtgcattttcatgccctggatctgttgtaggagaggcagcgtgttccccactgctgctcttccttctgaagcaaaagaaaggggtgtgggactcgtacttccacatcactcttcatccgggccactcctggaatttctggaaacacaaaagcgcctcctgaaagtggctttgctttggatctatctattgtctctgcttaaactcgttgacaggttccctcaaccaaataatctgtataaaactatgcaattttttgtttgtttgtttgctctctttctttcttccttttccccctaagggtttgcaatgagcagttaacacaggaaggggttgagtggagaaattctcttttcttcatggtgcagtggcagaaccttccactgggggtctccatttagagtacgtgactcaggattcctgaagactttcttttttcctttctttcttcttttttatctttttttttcttttcttgtctttttttttttaaggctctttggttccgttcaaaaaatgaggctctttcggacagcagtaggagaggcagcttgtaagaccatttaggtaacgagataagccagccttcttccacaatgatgatcataataataaaataattaaaataatgaaataatcaataacttttatggagtgctttgtgacaagcacacgaataagcacttttacatggattatcacatttaatcccccacaaaaaaagcctccagggagttgaaattaatggcttcatttttagatgcagaatccaaggcttaggtgggagagctgatatttaaaaccagacacttttgccccagaaccgacacttagaaccacgattctgcaccatccctatgtcctcctcctcactgtgccggccagtggctggttctgtatgatttacggagagacctctgccaggttcctgcgttggaagaatagctccaattgatggagtgggcctcttttcctttaaaggcaggacttgccaaaagaggaaagagttcaggcgacctgtcaactttgatgctcttcccgattttgttttttttaagtcattacgattttgtttaatgaattgcaacaaaccatgaggcttttggacttggggaggaggaagggagaggggaaagaacgaggctgtgagaatcatcagcactgagaatgatggagtgtatttctccgcaaccaattccaatccccaaatctctgttgtactggggagctctccaactaacagaggaaacgcagtcactgcccggcaccgtattaatgatttatacaccccgcaccactgcttttgttcacttgcggggcctggtcgtgttcataacggaatttcagggagtggggtcctgccttgccatgctgttttgctcagtgcagtgaagactgcttcataaatcaaaagaatttagtgctttacaaccttcctgagctctgagatggtgtgcgcctgtgtgcggttgtgtatgtgtgtgtgtttaatcagattcacttagacacattttcattgcctttctgtaaagaatgaatgaagaacgggatgcgatctgtcttaggtgtttcagggctgattggtttgtttcacagtggcatcacggtcctatttgtttcccatttggtgtttatgctttatggtgttgtctgtgaaaatgggctgacactcttttattagcataaagagattcagatcacattagaatcctccgtccttctatatcatcaaaaacaacaggcaggggagagggcgagttgactgtaagccgaatcaccatttgttcacgataagtcaacaggagcttgatgtgatctttaaacaaaggggtttttgagccttttaaaaatgattctttttcaatttttcactgaaaaagaatgcagcttcgttttgaatgttatcgaggacatttattttccggattgggaattctggatgtaggaaagtttcttctcttgagtaagccacagaaagctctaattttaacctccgcttttatttttttcctaattggaagaaaacaaatcataacctcatatattttatttggagccctcaatcaatctttcaagataccagcagagaaaagctctttttttttttttaatgaattgcacttgtacttgtgttttcttaattatgtcatgcatttcattttgtgtgtggtgatatttctttccctatagaactgagaactgaaaaccaacagaagacagagtaggagtttgagggggtaaaacagaatatttagaaaattagaatgatactttaaatattccagtcaacagtaatatttttgtctatgataaaatcttgattttaggaaatgctcttgagttaaaaaagaaagatacgtaaggcttttaggaaataaacatgtcattttagtagaattctgaagtgaatacatgaaggaataaatgcaaagacaaatgattaaagccctactctaccctacccccccccccatactgggggcttgaatttcttttacaaatgtgaaagttttagctatctggttcttattaacatttatgcttataaatttttttaactgtccagtatgcttgtcagtaatgatgaaattgaagcaaatattcattgtggaagatagtcttttatagccttcctgaaaagtggagaacagaatatatatatatatatatatggaacattacacacacttttcatcatgggacatatgatacagcattttggactcggaaagcaggtgtccagcaaatgcactttacatttatattgtactgatttttgtatttttgtttgttctctattatttgaattcgtgagtgtctcattgtttttaattatgtctacatggcacaagacagcagtcaacatctgctctattgtttacttggtttacatatatctttgatgggttactaaacaatctatttttcaaaccccaaacagaagaaacaagctgaacccatattacagcattttgtaaagacccattatgcaattagcacttgggatttgtgcaaatctggtgattcacccaaacaaacatccctttattctgatagttcttcctggctttgtgagaaatatcagtttccaaaaaaataaaatcacatttcctctttaatcatgcagcgtgccaagaagattatgtgtttatatgagggatggatcctccactttgtgtatcagagaaagatcaacttttcaaaataatgatgtctttaattcaaggcagcagttactatattacataagacaactatctgcttacacatagcagacttttgagagttacatggtactattggagaagagaaatgctatgtttttacctgtttgtataatcttcctaacattgcatgatctgtttacagaaggcatagctggtcatctcttgcaaggcatgtgaggcccagaatgattaagtcacctcaaatctgattatttctctgaagtcaatggttaataattaatttactcactcattcatgcagcacatccttatttagcctctgtctcagagattgggttggtcattgaagggatacagacaaggaaagcaggtctgcttttcttcatggaggttacaagtctgtgggagagagacagcccatgagcaagtgatcatcacataactgtgccttgccaggtgtgataaatgctctgaaggaaaagagtgggagttggattcaggggtgagggaagcttttttgaagaagtgacatcaaagctgagatggagtgggaggtaggcaaggaggtggggtcagggtggaagagaggattcacactaaggcatagagtgtgtgtagtgcctgttgcttgcctaggtgtctttaagatgctggaaaaacaaagggaccagggagccagtgagagaggggtaaagagacacataagggccagagacgactggagtttggaaatcttgacctagagttggattttttgccaagacgaatgaagaagacagaacacacacacacacacacacacaaacacacacacacacaataagagggtttaggcaggagttaaatgaccatatttagcctttttacaaaggccagtttggcttttctgcagagaatagagggagacaagatagaaagctgaggacgggggtgtcaagtaggaagtcactgcgatactactggtgcaagctgatggtcgcttggactaggagtggacagaaaagaaacggccaggagtaaaacgttttgaaaatcaagcctgagattcatccccgaagctgatgttcagccagaagagaagaaatgcaactccctgaagtcagacttcggcaggctttggtgaagtcaggtggcactgacctgggtggtatgcagcttcatggaagtgagtgacaggccagtctcagcatatcttaggccaaagctcccagagctcagaatttttcatctgaactctaccatcaccaccactatcaccactgtcaccaatccagtgctattatcaccaccactatcaccatcgccattaggaccatcaccatcacgaagcaactggtctcatgtatgagttggtagcagtcaccaaagacaaaggcactcaccagcttggtaaggtgctctgtagcatcccacttctaatatggtgggtgagaagtggggagtcatttttatgaaatgtccactgagcagtacctccacccgctgcctccagccacaggagtacaggagtgaagtgcattcacgggaatgtgaaacagaactgactttgagtctgaaacaaattacaaatcttatgggcctccaactagctctatgggcatgtttctcgacttctctgcagtttcatttctacatttacgaagtagaggtaacagcaagaccacaaagacatagcattgttaggagtatggcacgagctagtttgtatactaccccagtacagtacccagcaaacagaaggagctcaatacatacttctacttttgatgctggaggtgatggtggtgatggtggtggtgatagtggtggtgactgtggtggtgacggtagcgatgatggtgatgatgtgaaaatggtggtggtggtgattgtgaatggtgacggtggtagtagtggtgatgaaggtgatggtggtagtgctggtggtagtgacggtgctgatggtgatgtagtggtgataatggtggtaatggtagtgacggtggtaatgatggtgatggtgatagtgatggtgttgatagtggtgttggtggtgatggccatggtaatggagttgggatagtggtgatggcagtgatggtggatggtagtgttggtgatagtaatggtggtagtgctggtggtgctggtggctctggtggtggtagtgacagtgctgatggtggtagttgcagtggtggtggtggtggtgatgatgtttggtgatgagagtgattctggttagatgcagcgtggtagaatagtttcacacataagtacctggcttcagatttggttcaagtctaccacttaccacctttgcaccgttgggcaaattatttaacctttctttgttttaattgtctcatctgtgagatggggatggtgatattcattgtcattatgaagactaaattatttaatgtttgttaaaatcagaatagcgttcctataaacaaactcttagacatagagaacgtttgttaaataaagtgtcagtgcagaatacagcttttaacaaaaaggtacctagtggcttctggacttctgctatattcttgattttgctttttatagcaggctgaaaaggctgtctttgccttctctcaaccgccagacccaccccccatctctccatgtgttctgcgtagaacaggtgtgtggtgagccgaagttctggcagagcgcaacatgaaaaagactcccagtaattataaaaataacaacgaaggctgcttagcgaggtaggcagatgagcacaccactagccagaatgataaatagcgcctgcaaatgttaggtcccagtgggagtatgggaacatatgggatgaaccacactaaaagttgggcatcattggtaagttttagatggttaaggcaggctaactccagtgccaatttttttcttctttctttgtttttttatcctaattttaaatccttcagttcccttttgtccctttgttctattttggtcctaaaagaagcattcatctttgaggccagccagggaatctccaaggaagtgaggtctgtgccgtaatcctaaaaacaaatggccaccctggagtctgtgaatttccacgttgagctctattcaatattgttgggggagatgtaaatgaatgtggtaaatatttaatggaatgctgacatgttgagtccagacctatgataggtgggcgtgtagaaaaattagtgcctaaccagctcaataagtttacaagcatttgtagaagaggcaaacaattcttgtctgccaaacattatttaaaaagaagacgtggagggtggtaggttgatttcaggtcagtgtttgtatgtctgggtctgaatatagtttggagactgtacaatctgtttggcatggctctgcagcagtgggatttctctggaaggatattttggaattcttgttcaccacccaccatgcttttcctgggcctcagaagagatttcagcatcgaggcgagatttagaatgtgggcacctgagtgttggtgccagctccttagtagatttccagggttccttacttagcaattacatcaacatccttggtcatgtgaagcaggcagaggaaaggaagtaggatttgggatcgggcaggtgtggctttgactgccggccctccctgctcaagttgccatgaatgatgtaaggcctctgagttctaatatcctcatttgtagaatggggctattatgagtaccaataccatggacttgttaaaagactggatgagtcaaagtgttggagtgcttagaattgtgtttggcacatagtgagacctaggaaagggtttgttaaaaaattaagcagaacatatcttctaggactgccttttatgcaagtgtacgtgtatgtatgcattaatctgtttttttgaaagttaccttttcttaaaaaaattaattttattgtaagttgcaggatacatgtgcaggatgtgcaggtttatcacataggtaaacgtgtgccatggtggttgtctgcacccatcaacccatcagctaggtattaagccccatgttcatcagctatttatcctgatgctctcccttcccccaccaccccctacaggccccagtgtgtgttgtttccctccctgtatccatgtgttctcattgttcagctcccacttgtgagtgagaacatggagtgtctggttttctgttcttgtgttagtttactcaggttaatggcttccagctccatccatgtccctgcaaaagacatgatctcatccttttttatggctgcatagtattccatggtgggtatgtaccacattttctttatccagtctatctttgatgggcatttgtgttgattccatgtctttgctattgtgattagtgctgtatgcactaatcttacaaccacttttgtactagtccagaatctattagttttaatggacagctacccaaatcaaacttgcttaagcaaaaatggggatttgttgattcatgaaactgggataattgaaggtcagtcggtagtaagtgaatcatcatttaaacgctcagcactctaattgagatataaacagatgtgattgtaagaaacaccatgaataaagctcaaacacttacaaatgggtgcaagcccaaagaatattttaagtatgtggttatattacttagagcaaccgcacaacaaccctgtaaggggagtgttattgccccaaatttataagggaattaattgaggttcagaaagtttaagtaacttgcccagggaaaaacagccagggattttcagagcccaaatttggacccaaacttcttatggcttcaatagctgagttcctgatcaatatgatacattgctattacgataaaaataagtactttttattagtaaactggagaccagagaaattatctatctatctgtctatctatacgtatacatatacatatacatatacatatacatatacatatacatatacatatacttatacttatattgtttgttttttgagacggcgagatggtgttttgctctgctgcccaggctggagtgcagtggtgcgatctcatctcactgcaacctctggctcctgggttaaagcgattgtcctgcatcagcctcctaagtagctgggattacaggtgtgtgccaccatacccggctaattttttgtgttttttatagagacaggctttcaccatgttggtcaggctgttcttgaactcctgacctcaagtgatacaccctcctcggcctcccaaagtgctgggattacaggtgtgagccaccatacctgtcccagagaaatatgttttcaaaaaacaaacaaacatgaaatacgtggaaaggcagcataacatgggattatgtatggggccagatttacccttcacaagctgtgtgattttgggcaagttacttgaccactctgtgtcttgttttcctcacagtaatatgaagatagtcataggatttaccttataggatagttgtgaagattaagtgagttaatatacaaaggagttagaagatgtttggcaaataataaatggcatatatagtttattttaaaatattttaaaatagattgtcatgtaagagccagaaaggaaatgaggtcactcagagtggttcctcttttgatgtccccagggtgtcccacaaggacactgctaatctggggagttgaaaatcccacctgtcagaggctctctgttgccaccagctgcctggccatgacatcgcagagagaccatcttgcagcagtcagccccttggctaatcctctccaatgagaggttcagctgcacagcttggcacagcttggttctgggtccctcacatctctgtcttgtctgcaaaactaggctgtatagtctctgaaaacacagttttatctgctacctccttttctcctccagtgctgtatttggtgggttcccagtgatggctaatacccattcattggtctgataacatattttttcccctggtctgaagctggagaaaaaagcttcagcagagagaagccatctcctgttctgagatgactgctagttatcggacaagggaatgaaagatgtgttttgcacttcttaagcacagacttgcttttacaatatggggtgccttagcacctgccccatgttgtttgaccttcttgccaccttgaaaacctgccccctgccaagctgtggtgaatgctgactggcaggttcatagcgtcaaagtcacagtgctagtaaacacgtcaacgtgatttcacgtgaaaacagccatccaagctgttaatatgagcccgccttaagggattttgactttgcgcatgcctgcccttagtagaaagtacagcacatcttgctacctacttggaaatctgatggacagtcagaagctcctctggagtcctttggtgaatttcacaagagccatcaactctctacaatgatggggaatatttggggagttacatgcgcagttttctgggatgagggcacaattcagagtggtccaatttcagagtggttcatgcctcaaaaataagattgaggaaccgcagtttcacccttagaagaggctcaatggtatgggaaaaagccaaggagaaatcagcccttgaggtggagatgatgcctcagcttcacaaaaaaagggcaacctaataatctctttatctgtcctcctcctgcgttccttccccttctgttttctcctccagtggttattctttcctggtgttccctggtgattagcccatttccatgtacctctgactttctcttgcttgggaggcatttccccacttcctgaagactcagtggtgggtggtgtaggtcagctcttctccagccatcaaagtcttctcctcctctctctgctctttggatttgtattcctttacctctaaggactgttgggatggttgagattgactaaggggtggagagtaaaggagatgaagaaaccactcagattgagttaaaatgtccaagctaagactgggcacatggctcatgcctgtaatgccaggactttgggaggctgagttgggaggatcacttgatcccaggagtaccagacccgcctggcaacacagcgagacccccatctctgaaaaaaagtttaaaaattgccagacgtgctggtatgcacctgtagtcccaggttttcaggagtctgaggcaggaggattgtttgagcccaggagtcggaggctgcagtgagctatgatcatgccactgccttccagcctgggtgacagagtgagaccctgtctcaataaataaataaaataattttctaaaaacccaggccaccatttctcagagtatattaatccatatcgcattcaaaaaaaagaaagccttcttatagtattgagcacaagggagttttgtagttttgtagcctctcagttcatggggatagctctgtgtttgactaactctacggccttggccaattcacttcccctctcatggtctcagtgttcttgttactaatgtactagatggaacagactctacttcataggaatgaagaggggataaactgagataacagatacaatgaaatgagtactgtgtctggcacatagtaagcattgaataagtggtagtgactctgttagtgatgatgaagaagatgaagatgtaggaggaaggaatgaagaagagaagaagccaaaagcctagcacaggtctgatacataattctcaaaaagcagataatccaatagatagcaaaatgaatgatgagtggatgggtgggtagacggatgggtggatgatgagtgggtggatggatggatggtgtgttggtcatcaaatcagttttggaaagtctggatcaaacaagatccagcagttttttgttttgttttgttttgttttgttttcttctttacaggacttctcaggtgcttttatatgctaatagtcatcatgaattcccaagaggaagacagggcaagctgaatttctccaactcatttgtccgtggtgtcctttttacaatgagccatctgatgagccttctatccatgcaaagtatgccttgcaagatgccagtccagcacacttagcttctaaagagaaaataataggcagaaagctcaggtggttcagccagttcagcaactgaatggaattagtacaaaaatcctcatttaccagtcctggagacctgtgctgttaggagtggcctctgtgtccagctcctgtagggtcctggagcacagaaggcagaagatgtagagagtgcacaaagaaaagtccagcggagtagctgcatcctccccccttctgagaggcctcagggggtatttgtttgcctcaagcaaggtcaacaaattctcaaacccagttgtcattcatccccagacaggtcagaggtcggttcctgaggcattgttgatctcagcagagatgatgtgcagggttgatattcttagatttgctcattcagccagtcagtctggctttcagaggagaatcaggtcaggaagcgcttaatgaaccaagaggagcatggtgctgcctgaaccactggggatttgagtttgtaatgactatcagcaggctcctcacttacaaaacctactggaattttctttgtgcatctccataaccatttttagagatgtggttagtactgctggttagagtaacccagggtcctggattctttaagttacttctgatttaaaggtaccatcttcatcatccctaaaaaccataaattgaacttgatatcctttttactgttttggtttcaaaaattgcattttccatttacagaagccatatacctatcctttgttaattcctgggtcttagttttttgtttgggacatagaagaaggaggtaagctcttcaacaagaaggcacttcacaagttgcatttgttagcacgctttcatttgagcaattagcggttgaagggaggaagagttttgatatccctggcttgatcctccaaccagctgctaattctgttgtcactatgacaactatcaacagccatttactgagtgtttgctatgagcctctgagctaaacactgcagtatactgtacttatttaaatctctggaccactccatgtgttatggctactcgtgatattcttatttcgcagataataaatctgaggcacagagaggttaagtgatgtgcacgggaacacacagctgataactggtaggaactgggcttttaatgtggtctatgtggtttaatgtgagctcttaactactatactatggtgcttgcaacaagggagccaggcatggtaagaagttgccaggaggtgagagaatgtaatgccacaagaataacatatgcttagtacatacttgtcattctcataagaacttcccatggaacggctcatttgcatacactaactgaaagcagtctctaagtggggagatgtgacttctcttctccgggtgtctttttttgctagattagtcctccactgagatttccaatgggggtggttgtaatctggagagaggttggttgatggtctggtgtatcctgtccacagtctatggaagcttttcctatattcccatcttgataatttgatgcggttgtgacttgggtgtcacattgacaacccttttgtagccatcctctccttcactgggaattcatttgttagtccttggtattctaaatattatgtagcatctcagggaatttttcttgcggtccatgctaggtaatgcttttccatgttctcttctcacctacgctggatggagtttgagtgcatgtctggcagtgagtgtcatttctcagttctggttcaagctgataccctagtgtcatcattcttgatgactcagcaggtattacaggcatgtagggaaacctgactcttggtaactgaccaggcacacattctgttgtttaaccttggacaagtcacttggactccctgcgcctctgtctcatcccacaggtaacagatcattctcaaatacttattgagcaactactctgtgcccagtcctgggtgaatggcaggcaaacacagggattgaggaggtggtggaggggatagaatggaagcacacctgtgtgataatgccagctaggcctttaccatcccagggcaaatcactgctgatgtttcagaatctcagccccatagatcacgagtgctgggattggagcaggaggtagtgctgggaagacctggcatatgactgcttgtggaaggatgggatgtatatataagcagttttactggggggataatagaatggaagctcgaacagcaacatctgtatggggtgttggtggggcactgaagacagacagagctgccatgatgagcagagagatgaaaaaacaattttgaatgggtgcattgaaaacattctgaagaatgaattaaaattaactagcactttctggatgccttccaagcaccaggaacacccaccttcagcatgtcatttcactgctgtaatgcatttatgagagggtacaggtgttttgtaccatcttagccctgatgggagtagggctcaaggatgagtatatcgtccttaatcagaaacataaaagggcgacagagcccagatcccccagatccaaacccagcctctccaactttgaaacgcaggcttttcctactgttgtgatgccctcaggtcacttgtgatgaccttggaaacataggtagctctcagtggtctgggggcccctggcagcccctccaccttcctcacactttttcagtcagtcatttctggaaggatttgggaaaacttcatttgctagtggacattttagtcattgggtgagcaagaagaaatggcatacttccttatttgagccaatctgccttctcaaaagtgtgatcactattaaaagagtcatgatatggtgtgggcagtctctgaaccaaacacaatgctgaaatgactttcggacaaaggtgatggtgcacttagttctgtcttgggtggcagggacaactttgcagaagctgtcatggaacatttgacttaggccaacaagattgatctaaaaggaagaaaggaagagaggaaggaagggtatttctgcatagcaggcaagtttaaatggaaaagtggattcacagaggtatttggcaaagataatttgccagtgtggtttgaagaaaagagtgatctgtagaaaaacggaaaatttgtatcggaggatgaatttggacagggtaaagtgaggaatattatgaagggcctcagatgctgtaggaaattttccattacccacttttgtctggaaacaaagtgagtgattgtgtgagtaattacataatctgcacaaatctgtattttgaaataaacattgtcaatatccaaaagataagaaatgtgatgataggatcagggaaacactctgttttatgcattttgttttgttctgttttgatagtcaacaaatggcaactgacagcttctttttagatagctttttagaaagcaaagaatggttgggttgatcctacagtgagctcctgacctgtgggagaggcagctttttcgcagatatgattattggtacaaagaaatgtggctcaacatgcctagatcttccagtgtttcaagagatagcataaatctagattttatatgagatgcccccattaaacaatattacctttttttttttacactgtgcagacaaatcattatcatgatcatcatcatccccttctgtggactggacttggtccccacggctgcaggttgcgatgttgaccgacagaatccatgaggcaggagttggtcttctctagataccccctgtctctcatcttccagacacagccaacacttctgtttcttccttctctttcattgacgtctaaactttgagaggctaccactcagaagggccagtcacttatgttggctctctttgttagtctggtgtcaaactcctgggctcaagtgatcctgctgcctcagcctccagagtggcggagactcaggtgtgcaccactgtgcccagcttatgttagctgttaagatctgggaaaggaggttctgggcgcggtggctcatgcctgtaatcccagcactttgggaggctgcggcaggtagatcatgaggtcaggagttcaagacaatcctggccaacgtggtgaaaccctgtctctactaaaaatacaaaaattaggcaggtgtggtggcggatccctgtaatcccagctactcggcaggctgaagcagaagactagcttgaattcgggtggcagaggttgcagtgagctgagatcatgccattgcactctagcctgggacagagcgagactctgtctcaaaaaaaaaaaaaaaaaaaaaaagaagacctgggaagggagatgcagtatctgacagccagagctaaaatgcctttatctagaacaggaaaagaggagttaatacctaagaaggaaatgtcatcatggaaggtggagatagatggaagaattttttttttttttttttaggtggagggatgagattgaactatcaaagcctggctaagaaaaagcaaaatccttgatggaaatctctggcacagggaaaatgagcagaactggcaccaaggaagcattaggagagagaagaagatagtggggaagcagaaaggaacagcaaaggagcgagtatttgccattgtcttgaagtctgacttcttggataaaatacataccctagattaagggttagcaaaccatgggctgtgagcccaacctggaccattgcctgtttttgtataatcttcgaggtaagaatggtgtttgcatttataactggctggaaactttttttaaaaaaagaataatattttgtgacctgtaaaaatgataggaatttagtaaatacagtattacaggaacatggccacaatccttctttggtgtattgtcaacggatgctttttcacgctacaacagcagaattttgagcagttgcagcagagattgtaagttctgcaacacctaaaatatttattatctgagtgtttacagaaaaacatttaccattccctgcccgtgatgggcagagcagatggcaatacacggctctttatttgacttccgtatgtttcagggatctgcctgtttcttagccactaccagaactgccccactctcctttcaccttgctgtttcttccactatttaaagttcctgcattacaccgtgagcgtaataccacataatagatgttgagtagcccgacatttgccatgaaccatgtgcactgccactggggaatggaaagacacacgacatagtgtcgaccttctagaggaggctccaagaaggaagaatcacagctcagcaatactaggtgcttcccatttgggagagcagaacctatgttaagaaaaagaggttttgtttagtagttgttatttatttacaggctttatgattagtggaaggttttgaacgaggacgaagtcaatacaacttcaaaaacataagtaccgcaatcatacaggacaataatatataaatacaaaatcagaatcagagaatgtatgagtaatggtgatcgcgactggaggtgggagggacagcccttattttcacacaagataaggaagatatttgtaactcaagaacagcaaaaggttattgtatcatggcgttcttaagaagaaaacagaaaatatccccggcacaaggtataactatatatctctatcctgtatgtaatatatctcttatttctatcctactaaaatcagcagattcttttatatataagcatatatacacacagtcacgtgtcccttaacatttggcactgggtatgttctgagaaactggtcaggcaatcttgtactgaatactgtaggtgattgtatctaaacatagaaaaggtacagtaaagtataacattataatataatctgatgtgaccagcatgatatatccaatttgtcatggcctgaaatgccattatatatacagtcatccctcaatatggtgggagattggttccaggacctcccctcagataccaaaatctgcagatgctcagtccctgatataaaatggcctaggatttgcatataacctatgcacatcttcccgtatacatattaaatcgtctttagattacttctgaagcctaatacaatgtaaatgctgtgtaaatcattgttatactctattgtttaggaaataatgacaagaacaaacagtctgtatatgttcagtgcaggtgcagaggttttttttttttttttttttctgttttagatgatctgaggttggttgaatctatggatgtggaaccccagaatatggagagctctgtgtgtgtgtgtgtgtgtgtgtgtgtgtgtgtgtgtttgtgtgtgtgtgtgtagagagagagagagagagagagaaagttacataaatacaatggatcactatcttctctgcagtttccagctacctcttcctcaagtttgcttattgaagcattcttgattaagagtaaggggatatagttacctctcttctatgctcaggaaactaagagtctaaagctgtaaatttgttgcctgaatgatggaattaagtctcctgccttctggtccagtggtctttctattttacaacactaaagagacaatttgatctgacacaggccttacctaagtaagtaagagctctcccctcctgttgattgctaaaggaaagcagacgggagagacacgtccgtctcacagtgatgcttctgtcctccccggtaacttctcagaaatgtggtgttgaaagtcatcgtcaaaagctaaagttagaaacagtatcgggctgttgagtaagaggggtcagtgcgcagctgttatgggagctttttgaattgtacaacgtggccactttgatgcatgagaatcaattacagagaaaccttgtcaagatggccaaaattcagccttaaataattgaattctctgccaaaccctgtccgccgtcgttatctagaaatgcaattatgcagctaaatcaagcaactaaaattagtgtagtgtaaaaacaccttggctatctgaaagtggaggaattgacatttggatttagaaaacgccaatagttggatatgtttggcggtgtttgaagctctctcccagtttcaacaaaatctatatcaagtgtcctgtttagagtgagcagtggaatgtggccagtgaatgtttcattttgaaggtgattttcagtgattcctgggacttgggcattatttgagtggattcacttcatcagaacttcatattattgctttcaaaattgtggaactacacacacccacatgtctttctaataagaagattagaagactgacaatttgattgttatctgagccttcagtctcaggtcaaagccttcaatctgaaaccaaagatgtgtctgtaccaatcatcaggaaaacagggaatacatgataaaagtggctaatagctgccggtactgcacacatcatgttatggttctaggacttcatttaatgataacacagccttttgaagtagggactattattatctcagttttccaaatgagtgaacagggttcagagaggctaagtaacttgttcaagatcacacagctagtgattatactgacacccaagtcagtataattccaattatattaattaatatattaattcaattggaattaattccaattcatgtcatcccctaggaatttatctgctcctatgtaacatatcccaaatgattgcttgggtattttcaaacaccagaaagatttcaaatctgtgcttgaatgtattttttatccatagttttggtgcttgttagctatgccttgaaactctgagaacaagaagacatctcttgttaatgtattgcatattaatatatcacagatgaaagctcaaaataaagaatgtcgttaaaaacacaaaataaaaggcatagaaaatgttattacagactgaaatacagcagtgaaaacagtgttgtggttaggaatcgggctctggaatgtgtttgtagcttcgcactgccttgtacgagctatgtgaccatgagcaaaccatttaactagtatcagccctgtttcccatttgttatatgggactgataatagtactgacttcagagacttgttgtgagaatgaaattacataacacgtgtaaataatttaactctgtctctctgcgtagcacacattgtgcaaatacaagctggctggtagttttatcttatttacaaattgccactttaaatttgaaatcagagagagagcgggaggaaaactagactgaatatcttcttattttttttctatcagtgccaaacgttgcccacattaacctgctggatttgaattttaactcggaggcgataatcacattaatttacatttctcagtttatttttccctaaaaatcccatgtagaccccatcccttgctcttttggccaaattcagtaggatgagcttatatctcatagcctggttccctctgtcacttggtctcttggtctctctctctgtctctctctctctctgagaactaaattaatgaagagtatttggttagtcatgttaggcaagctgttcccaaaatagcaccttccattttggtagcttcaactttgcagctgctgtgtctcttcgtcgtctgggaagaaaactttcacattaagagttgctgatgcggattttctttctttcctctcccggcgttgatgagtgcttggctcctgacagaagggatttggctcccagctttgtagttcggaagaagttgggtctatagatttccccctaactctccattgatgtgttgagcttcagagggaataataactctacgtaaagcatgctggcgtctcaaggagttctcctgcatccttatggcgtgcctatgattgtaccggcagctccttaccttcctggactgattcaggtaattcaaggcctctgccagccagcaacttaactccagagtgctcagagtaataattggaatttttatggttgagaaagcaaacacttttaatacaggaaaaagccctcgcgtagtcagtgagaagacagtaggaaatcaaaaagatggatcaccctaatctagctatcgacatctctcatggctgaataaatggtgtagttgagctatatttgcttgtattgatctgactgctatttaacattcatgtcttagcttcaggaggttgaccacggggcaaaggatttgctctccttctcagctttctgagggactcagtctcccagagcagatcatgagacaaagtaacttatcatgaggtgactcagttaagagctttaacccaggaaatgaaaggagcatgaaatatgcattaattcataggacgcctccacacggattgtctattttcagagaaggctctccccacctgaatttgagtggtggcactgaggcaagaaggaacactctattgatgggtaatttatgaagctcagagattattctaggaatcccttgccagatgtgtacatcttaatgatggcaagaaagtggagggttgatatgtgtgctggttttactttgaagtcttttaattctgtgcagagaggattaatctaccaataaacaattggggacctttttttttccccctcatcataaggttttctttgcaagcaggtattgccttccgcgtttatgtctgaagttctccgttgaaagctaacatctactagcgatagaacccacagatcatagaaatccaaggtggctttttgttgttataattagttttttgagtataatcatccctttgcaataaattctgtatctcctttctacagaaaaggaaaacaaaatatatttaggtacgtcctttcacctttactcctgtgcctccctctgtcccctccagcccctcatagttaaaaactatatgataccctagctcattaattacaatttctgggaaccattctggtcacttttccccctacctcttctgaactttgctgttaccttttgttaagtgtacgaacctgggtgattagagtcatctgggggtgattccaagtcacaacaaaacattctctctttctggatttatggccgttcctctgtttggaagcttttctctgtattacctgttataaacaaatgggtcatctggagaacggtcctttgcagcgtggaacttgttgcgtcttccctggtatacacaggccggtatgataaggttgccatttctgaagtagggctcagtggcaacttagaaagttaacaggcctgttgctgctactggaaacgtggggtgaaggtcggctgttggagctttgtcagaccctctgccgacccatctgataaataattacaggcaaatcgtggccttcactctatgctgattgatgctgaaattgcttttgaaagttctcataagttcctgttatagattaagtgccggtgtaggaaaaataacggcacccactgaaatgggtgaatgtaatcaggtttaatggactccagagcttgttgggaattaaataactatcgatttgttggaatgttgctgtcattacgaaatgccactctggacgtattaccccagtgatagatgagaagatgcaagggccagctgagaaattggggaggccctatttcttcctcctttgcagagcatttgagaaacatagccagttatttttggaaagaacaagtggtcttacttgtaaatcttagcctgatcatactgtgtttttccaagcgacacctctggtaactagttacccataagttaggagagcagtttagtgaggagcctctagaccagctgctgtgatatgtgttatctcctttctttctcactgctgtggaatgcactggaaagctaacacacagagagaaactggctttacttatggtttgctgagacagcccatgttatttaccctttggcatcaagtagctaaaatcaccccagtgcagtaatatttgcaaggggagaaagggcagtgcaaagggagaaaaaactgtatcactcacagatgctcagctctgagccgatgtttctgctgccagctgtcctgcattgctgcagactccacttgctcactagtttcttgaccttatgggtttcttcctcactcaggaggcaaagtatttcctctagggaattaaggttctatcaccacctaaatatgtcattggcaagatgttaaaatgagccaaaataaaccatgtgtactccatcactgggagtaatttctctgtgactggagatgttgaaacagagttcatagtgtccacttggaaggattgttgtattatagttggagattacttttcaaggtctttccaacctcaagagattttgtggcagagtgctcccttttcatattttcaagagtcattttgaaaattcagaccagcatcgccctgttttagttgcctcagataaagaaaaaaaaaaaaaaaaaaaaaaaaaccaagtgatttaccagtcatttggtgtgccagactttaagacggcatccacctaatcctgcaaaggcagtggatggaggtatttactgatagcttcaggaaagttactcatacaggatcttttattccaagcaataattgatagttatcatctgccctacccttcctcctttaggaaaatcagaatctttatcatattggatctcctgaacccattattttatgtctacacttgttgtgtgtagccaaatagagagtttttccctccagccaggtagagaatgacagaatgactatggagaattcagctgaacctgtctggactgtctcatgtgcagaaaaagcagagaggaaaggataagagtagtattcccaagtgcattgtacaaatattggctgctttcccccttgatagagatcccgatgttgatatctttggataagaagaaccaatgtactacttaacactacttatttctgaatttctagtgatgccttgaatgatcagtgaattgtctgacctggtaacacaggagcctcagtcacttgcccaagtcagcctcgagtccagaagctactcagaggtcttagccaagccatggaccatggccaaatgacataaccaaaacaacagctttgtaactggttaggctatttggttagtgtttgggtctaatgtgttggctctgggctgcaagtgtggaccctcacccctcaatctaggtatctacctcatagatatgcccttgggccatacatggccaagtcactttcactattggacaaatcgttcccatttcatccaggtctgacagatgatgagtcagcagattattttcctggatggttgatggtgtaaatagagccatattcacctcatcatgcatttgttccttcagttatccattcactgtatactcaacctataacaaaagtgacagtcatagccactgaactgtgggttcacaatctagtggaagaactagtaggtaaaccccaactataagactataatgaagtcagagggaggaaatgataggtaatgattgttgaacacaatattgtcatgtgccaggctctgtgctaaacacttagatttaggatctcaatttatttttataataaacgtaatgcaattgggcagtatttgtccaccttcctatatctgtaattgtaaattccaaaaagctctgaaaatcaatttcttttggaagttgggcaccaaagctcatttaggaacagaaacttgacctgaaatgatgtgtagctatttatagactttctttatcccagctaatgtaaatattcatgtattttgctgtaggaatatttatgtgtttgattttcagggtgttgtcctagaccctgctgagggctttacataatcagcatttccactgaaataactttctgaaaaagcccccaaaatctgattttcaaaatgctggtgactccaacgggtcttaggtaagaaattgcagtcatgcctttaattcccctttgcctatggagaacctaaaacctacacttagacaaagctaggtagcccaaggtcacaaagaatgcgagtggtatagctgggatttggactggatttgttgaaccagggtcttttatccaccaagctaccctctaggttgaggtattcaggcagggtggcttatgaaaacacaggaaaggaagtaacccagtgcctcttagagtcgggaagagggtggtttcaaaggaagggaactggtatttgagttgggc[450 bp omitted]agtaactgggattacaggcacgtgccaccacacccagctaatttttatatttttagtagagacagggtttcaccatgttggttaggctcatcttgaactcttgacctcatgatctgcccgccttggcctcccagagtactgggattacaggcatgagccaccatgcccagcctagggctggtgaatgtttaattttctgggtttgtgcatcatttaccattcctttctcttttaaagtattattttatttttgtaagttccagggtacatgtgcagggtgtgcaggtttgttacataggtaaaggagtgccatggttgtttgctgcacctattaacccatcaccgatgtatttagcccagggtgcattaactgttttccctaatgctctccccacccccacctaagcatggcaattatcatttaccgtttctatgccttcttttctctctgagatggtaagctctcagagggctgagatttttccagcctaaactttctatagctagacagtggcagaaaaatgccaatgtatgcctctctgacgtggatagcaatggtttaaagaaaccctatactccatgtttttatttttatttcttttagagaaagggtctcactctgtcactcagactggagtgcagtggtgcaatcatagctcactgtagcctcgaactcctggtctcaagtaatcctcagcctcctgagtagctggaactacagacatgtaccactatgctcagcttttttaaaaaaaattcttttgtagagatgaggtctcattatgttggccagcctggtctcaaactcctggtctcagacacacacactgtattttgaagcagaaaccagcgtatgtattttatgagacatctacatacctatatgtagtaacaatgcaaattatagaaacatcggccttaacaatggacagagagtaaccatccttatagaaagataaagaaatctataaagaacttacaagtaatttgggtaagtttctggttgaacttgaaaaacaacagcttgtttggctctgtggctggcatttcaggtcttgatattgctgccctgcgattttatctccatgtttggaatgtctgttgattgggaaagacatcagcatgcacacctgatataaatgctggtggcgtcatttactctgaggctgctccatcttagtcactaagcggacttttctgtactgccaaagaggccatgtcaacagcggactaaattaaagagtcagggaggtggcagagagaatttggagtcaaacaggtccaggttgatatataggctctggcatttactaagcctgtggcctgaggcttgtcaattaacctcaccaagcctcagttttctaggctgcaaaacaaaagcaggaaggcctagcttgcaaagtcactgtgagttttcagtgtgattcatcatgtgtttattcagcaattatctattgagcacctactgtgtgccaggctgtgaactaggactaggtgatgtggtagaatagaacacactctagatctcttccaacaggaagttgatattctaacacatgggaaaagctagcatataaagtatgtttattctgtattattctggagagagaaggagagaggaaagatatttatgtattattattattttgtgacggaatcttgctctgtagcccaggctgtagtgcagtggcatgatctcagctcactgcacctccacctgccaagttcaagtgattctcctgcttcagcctcctgagtatctgggaccgtgggcatgcaccaccacaaccagcttatttttgtatttttagtaaagacagggtttcaccatgttggctgggctggtcttgaactcctgacctcaggtgatccgcccacttcagcctcccaaaatgctgggattacaggtgcaagccactgtgcctggccagaaagatatttgttaagaattcttttgtctgcgatgaagaaaattctaagtcctattggttaaagggggaaaaaaagcatctagctccagcttcaggcactattgaattcaggaattttgacaagccaagggctgtcactctccacctctccacagtggttatctctacttgatcctcactcacaagcacaccatgtccaagtggtggaaaagatggttcttggcaactccaagcttacatctcatctccttttagaaattctcttcccaactattccagcaagaattccagattgcagtctcattggtagatcttatagtccatgcacatctccaaatcaatcatctaatctctggttgcccactttagagccagagggcagggtcagccccaagaaagctgcatagactatgaacggaggccagatcagggacctcttaccaaaatgtgttggtggataagcaaaatctaggttcttgttatcaacaacaattatagttaaagctgtcacagacattcaaacctgtgctttctcccccataactttgcacacaccatcccctggggagcaagtggtgggtttcagatcttaattatcctgatcacttgttgccattgatcatatttactaggtagttttattgccttccacttcacttggcttctccattcatgatcagatttgccaaaggcagggatggctgttttacctggtatcttctccgttgcactaattacagtcatgtcttccactcgtgtatttgggatattccaactctttttacagactagtaagtcacaacctagggaagtcaagacagtccaaccaggacatccaacaacacaataatcagtgcaagattgtgtttctcagattcatgatccatgcagccacaccacttctcttcacatcagtgatgcataaataaatatattaaaaagagcaaacagagccttccagttattaactttgtcatgacgtagacctcccatcattccaaagcactcgaagatgctagtgacttgtcctattctgttttatataaattcacttttttaaattaagagattaaagggacactgtcaatctcttctgattaatatcagtcctataaaaagggtgtcttgctgcagcagccatctgtcattttgatcattttaaaggcatgctatatcagcaactatgctttttataatacgttggcacagggcagggagggttggaagacctacggatttcacactctctgctgctgctttggtgttcggcaatgtgagcttttgatggtggagcagagtcccctccctgtcttttaaaggttgttttgggtaagtgcttttcctgggtgatttatgatggagatactcacccctatttatgtttttcccccgtctaaagatagacctctcacacacacatcccaccagcttgcaaggagccagcatgttcacttgattcactgctgagccctaagagatgcccagaaacattgaactcaatactctgaaggtcttttcctctgagcaaccgagaccattatcttcagcaatggtcactgtctagattgagcttttcaggcttgtaaaactaggaggcaaaggctccatgaaactcattcatttattaagataatgatttatcaatcatagatttcgtgactgttgtcttgcaagctctggaggtattgggatgatcaagtcccagtctccgtcctcagaggttgcgtaggggggccatgccattcgcagtagagtcagaggttaagcacaactgtttgaagatagaactcttgagtctccaccccactgaccgactcagtatgacgtcttcattgctgtcagtggtctgacactcaagacaggtttatgcacagtccaaagaagatggcttcctacagagagatactccaaatgacagagttcctgctacatttcagagaacaatggtcctaccttccttccttccttccttccttccctccctccctccctccttccctccctccctccctccttccctccttccctccctccctccttccttccttccttccttccttccttccttccttccttccttccttcctttttgaggtgggaagatgacagcaggagctcctgcccccggcccccttcccaccttgcatccaacttagactaaagtaatagagttcaacacacccactgctgtgggagaaggtgttgcttggccattccttctcttctgctctttaatctgtattggctcctggaggaggggagaattgcagtgaggagggggatcacttgttcattccacattgttctcaggaactgctctctgaagacctatttcttcttatttcctgaggcagcacagttaaatttgaaaagaacaggatttacaacaaggaaacctgagtctggccattactctctctgtgttactcttggtaagttgcttgacctctctgaacctccacttcctcatctgtaaaatgggagtaataccaagtgtactctactcacaaggcctttgcagtgtagtcatggtgtcattagggcagcaagacaggatgcctagggctgggcttccaactcagatcttcccactcagacgcatctgagttggcatcctggctcctgtgtgatgcggggcttcagctctctgagcacccatggtttcaacctgtctgcggggatggtcacatcgactgcagaagggagcaatccgatttgacaatcagctcattgtaccaacgccacaactgattgccagcagtgttgtcttggtttgttcatgatttctggagttattgaatgttcattttgataaatcgagatgctctaggttgggaaaggagaatgtttacacttctctgctcccattcttggtggagattcctggtgagcaaggacacatgtgtttggcctgcgtggacagtgcagagatacaactggggaggtggcgaaggagagggagagatgccaccatggagtttgacatcttggctcatggctctgggtggtgtgaaaccaccatcctctttccacatggctggtataaaagccaccatcctcttcccactccctaagccaatagcctgcatagttggaatgactaagtcccagcctctgtcctcagaggttgcatcagggggccatgtcattctcagtagagtcggaagttaattacaagaaacacgtgaaggagagttgatcagtttcaataatgttgaatccttgcccaaatctttgtccagaacatgctgggactggaactggagctgggttgcaggacggggagggtggactttgtagggggaagagaggcctgtcccctccgttccatgtggccatagccttctggggacagactctttaggaccacccacacccctgttccatgcagctctggcacaccgtgggcgcttaataaatgttaaataataagaatagctcccatctgtcagtgcccggtggcaaggaggatgtgtgagtgccagccgtcactgggcagcttatgggaagcctttcggggggaaattgtagctctgagtcgcttcgaagtcccgctgcatccagatgttcccccaaagctgctatggatcagtgtccaggcaagggaggagcatgggactccagaacatctgcatcagagtgacagggggcgggaccagagagatgagaatctgaccagcagtgggatttgggagctggtattgaccaacagtacaagggctttgttgaggtttaaaagggctagaggagctgccctctgagcacacagcagcataaattcatacttccgtcatattcttggaagcaaatgccaactgggacttttcagattttgttataataacaacagcagctgctgtttttaggcatttactatatatgaggctgtgtgtgaggggtttcacttgtcgtacctaattgaagtaatatatcttagggaggaaaaaacaggcaaacaggaggtggtatggagtagggtgtgagctctagagcagactgcctggttcatctgctgcaaccattgaggcctccacctctgggaccttggatgccatttgctacctgtgtgaccttggcacagtttttcccttctgggcagtagtcaccctctttgagtggttgttaaaggaaccaaatcatgtaaagtccacaatatagcacctggcacatagaaagtcctcaataaatgtatttacaagtttatttccaagcgtaaagcaataccaccacaaccaacaccaatgcaattaaataatagcctcaatcttgagtgttttctatatagggaagccaataccttctactggctaagagtatgagcccttgagccagactgcctgggttagaatctcagctttactttttttttttttttttttttttttaactcctaagctactctgaactgcagttttctcttcggtaaaatggcccatattaaaagtgcctaaattcaagcttcgctgtactcttctgtaggacagggataataccaaagtcatttctgaggatcaaatcaattaatactccctaagtacttaaaatagtaaatccaatatagtcagggctaaaaaaaactgatagaaataataattgttacatgattattttatattttatattatttgtattatgcattattcataagatataatgcaatatatatttcaataatatatgcaataatatgtattttatgtaacacatagttataaatatataaatatataactacataatgccatatagttataggataattatatataatgattagatgacacatatcattgtgtaatactgtataatagttacatagtaatgattatatgtaatataaatgataataataattattatttctactcttgctactatgacaagttactccattggggattttttcctaaataatttctaccactttgaagcattctggccagacttattttaaaaggaaactgaggctcagcaaagtggaacaatttgccctcattcttaggactggggaagggcagaccagccaggtgtctggctgcagagcccgtcctcccgcagaccacacaattctgcaaagctttggtgtctgtcgtctccccatcctccatggggaaatggccatgtctcttgcccgtacaaccgactctgagcagaaggctaatgcgatattgtgccgctgtcatttctgatcagtttttcccccactgtctcacagcgggctgtcaggaggccttgttccccatggaagcctggctcctcgtggagaagatcaaacctggaggttgtgtggtgacaaaggctgaggaagggcactgctgggactgggtcttgtggctctattttcaagacctttatttttggttatcagtgttgaaacctggaaatacactttctgttttccgtttaaacacaaatcaagcaacgttaccaacacacattctctgtcaaacatgtcagttactcccggggctgtggacagcttgcaagcgatgtcttctattgttactgtggtggtgtgttatttctccctctacagctctgcatttgttttggcgagcagtgtaaacactgaggggcctgctctcggggaggttttgacagaacatgtgaaattgacatggaccgtccgatgaccatcttaataaggctgttcgggcagccctgtatttgcctgtagcattttccatgaattttggtgggggcttaaggattctaatgagctgggttttgtttcacacctggtgttttggcagacagttcccactgtgacttagcagagggacttggcacggcttgccagagggcctaagatttgtgtgggcgcccagcagatgttggatgtgttcacccatcatacagaacgccagtcatcagccgccgagtcccctctctgtctacattgtaagggaccagagctcccacttgctgccggtgatggagccgtctggggatggataaaaagcctttcattactgaggataatgcagagcatatgggattcttatctgtccaaacagttgtgggatttgggttagagacgccgtctgcatgtgtattttctttttctttttttaattttaattttttgtttttatttttattatactttaagttctagggtacatgtgcacaacgtgcaggtttgttacatacatatacatgtgccatgttggtgtgctgcacccattaactcgtcatttacattaggtatatctcctaatgctatccctcccagctcctccaaccccacaacaggccccggtgtgtgatgttccccttcctgtgtccaagtgttctcattgttcaattcccacctgtgagtgagaacatgcggtgtttggttttttgtccttgcgatagtttgctgagaatgatggtttctagcttcatccgtgtccctacaaaggacatgaactcatccttttttatggatgcatagtattccatggtgtatatgtgcgacattttcttaatccagtctgtcattgatggacatttggtttggttccaagcaatgcccctgggccacatgggacacacacaccatgatgtgtcagcaacgagacgtctatagagtaaaccacgatggcagaggagcattctacccaagagggcagtgtattttctttagtatttggttctagcaagtaggagcttcattaaggagcattttgtacagttccttcctgggaatggacacgacacgcgtttgataatgtctctgctttctggcttcacaccttcctcccatgttagcattggttctaaactcccaagcacagatgttaccaagccactgccctcctgtgtagaatgctcctctgccatcctggtttactctatagaagtctcgttgctgacacatcatggtgtgtgtcccatgtggcccacgggcattgcttcgttcaagcctttgtgttcagatctgccctgttatcagagacaagttgatgtcaacttacctcttatctctgatcaataactgttgggcttcctgtgggttgactgaagacccataagattcatgagacccatacgatcatgtgggttgatgatctccaccattctgaatctcaagaaaccaaagatgattcttgaatgtgtgtttttgttaagatccctttggctgaaggaacagaactcaatcctgtctagcttcaaaaaaaacgagaggggcagcatttatatgtttactgtgttttgaggtgtagtgcatgaacaattgaatgcacagaaactcttggactcaaaagagaaagaaaaaagtcaagccaaggaaagcacaagaggtaagacaggcctagtgatctcagcaggcagaatttatggacatattttgcaggcaagtggttctcaatcaggggtgatttttggcttgtaaggacatttagcaatatctggacacattttttggttgtcgtaagtggatgggggttgctgctatcatcctacaatgcataggtgcattagtctgttttcatgctgctgataaagacataccggagactgggcaatttgcaaatgagagaggcttattgggcttacagttccaggtggctggggagccctcacaatcatgttggaaggtaaaagacatgtttcacatggatgacagcaggcaaagagagctcgtgcagggaaactcttgtttttaaaatcatcaggtttcatgagacttgttcattatcaggagaacagcacaggaaagacccgccccccaaattcagtcatttcccaccaggttcctgtcatgacacgtgggaatcgtgggagatacaattcaagatgagacttgggtgaggacacagccaaacgatatcaagtggacacctggaattatcgagcattatccagaattatcagtcacgccgagattgaaaaaccccactctaggctgtcacactactgtgactcagctacagagactatcagtctctgcaagtcttcattcaacttttgctttctcagctaggatctgatggacccaacctatcgtatgtctcaatctttatatcagtgaactatgcccgagacccccatgtatttgcagcccgttcaaagtattgctgagtagtcctgggaaagcaggagtaggatgtagctggttgtgagctgttagccattccgagacaggcgtcttgcagggtgtattgatagccttcagtgcaccctatcctgtggctgacactcattcatgctagtgccttccatgcagagctgtctgtttgtagaaagcaaggcccaccttggtgccagtcttaacgagcagtcaattgatttggttttcgatttaagctcgttgcctcctttgacttctgtttaacagaaaattcactttgcaaaactgttttaaaacattgttgcttacttttcttaccataaaattaatgtgggctaaacctaagttttcagaaacaaaaagcacaaacaaacatacagagatatatgcatataccacatagatacataaaccacaatccgctacccaaaaatgcctactacaaaccactctttatgtatcctggatttctttgtggtacatatattttcttccctaaataattcttatctactctcatcgtattcacaaagatttgtaaaacttgcaagcagctgggtttttaataggaacaccttttgaaataaaattaatgaattttttttttttacctcatgaatattttctgttaggtttttaagactaaggtgatgtcttaaacaaacacatattccgtgtcctttccacatgcccctttgctcttatccctctccttcagcccatggcaaggtcgtatatgatatcctaagtaaatagatcaccaaagaaatgacattactttagtcagttgggaaaagaagatagggacaaagaagagaaagtagcaaaacaatcctatagattacagaattacacaaaaggccggttgccgtggctcacgcctagaatcccagcactttgggaggctgaggatggcagatcacctgaggtcaggagttcaagaccaccctggccaacatgatgaaacttcatctctactaaaaatgccaaaattagccaggggtggtggcacgtgcttgtaatcccagccccttgggaggctcaggcaggagaatcccttgaacccaggaggcggaggtttcagtgagccaagattacgccactgcactccagcctgggtgacacagcgagactccacctcaaagaaaaaaagaatgaagagagaggcagagattgatcggctccagtcaaccgggtgagtaggaggcttctgctttcagattttcttgtaaatttcttgaaatggggacattgaaaaatgtgctagttttggagaaaataaaaatttcatgaccacgatggaggtgtggttgctcctatggttctcagaacacaaaaccatctcctagagacccactgaagttcatgctcattttaggactaaaacttgggttaaaaatcaggcggctcaagagatcaagatatcttcctggcagccttctatcacaagtggagactgggagaccaaccagacttgccttgtcagctctcatcactccttctctcaaaccaaacgcatgtctaaggcgcaagatcggttttcaatttaagtgacttcgctttctctcttaaaaactaaatcctcctcctaattcccctaagtcctcaaagtataacatttttcctttgtagattggagaaagaagtcatggatcgggcttgccaatggcattaggatgaggtctgccagccagtccttgtcagaatgtgcacagaaaatttaaaagacttttttttttccaatcagtagcttaccagttaatactcctccctttccgttttgatagctgaccctcagaatcaaaatgaggatggcgacataccacatccgcttgagaggctgaggagggttgggttcagaaagacggatggctgtggcttgctttccatatgtgttcaccgatttagtaaatatttattcaacattcagtgtgtgctagacaatacagttccaggtgtgagtaagaccacttatatcctattaacaggaaaaaataaagcagaaaataaccaggagaatatcagatgctgttagctgctaggaaggaaataaaataggttatgggccaggcacggtggctcatgcttgtaatcccaacactttgggaggccgaggtgggtggatcacttgaggtcaggagttcgagaccagcctgggcaacatggtgaaacctcatttctactgaaacatacaaaaattagctggcatgatggcgcatgcctgtagtttcagttccttgggtggctgaggtgggagaatcacttgaacttgggaggcagaggttgcagtgagccgagatcaggccactgtactccagcttgggcgacagagccaaattccatctaaaaaatttaaaaaaaaaatggttacatggtagtgactgaaagggttattttagatagttgaaacaggaattagagctcagatctgattgacaagtaggtgccagctgtgtacagtcgtggggtatgggaaagaggtctaaggggaggaaaaaagcaaaagtcctgagatggaatgaaatgggtatgtttgagaaatgaccggatggtcagtatggctgtgacacagtgggtaaagagggaggatgaaaaacacaaagtcaggtgtgcaatcagcagccaggtcccattccaccttgtagggcattgcaggcagtttagattttgatctaggggaaatggcaaacccctgcagaatttcaagtaggagaacactatgatctgattgtatcatgttaaaagattcctctggaaagtgggaggaggatggacaaataatctttagtgggacaagatgcaaaacagacaggacagctagtatgcatggtactggtgaagacgaccagtaccatgttatccacgattggctagtgaatatccatatttcatgctgccatttctttgatcttcattgaccggagaattctgccctaaaaagagggcccgtttcagggatgtggggtaacagaaaaatcacagtgttaatggaatgagaggtagaggaccagggagtatagaaatgtatctgtgtctgtgcctgaaggtctggtattttgtgtggcttcaggggactgtagtatgtgtgtttaattgttaatgacccaagaatgcatccaaaggggttacatgcaaacctgcctgagcatggaagatcagtcttgagtgctttattaagtctggctctatcaaagctgtaagcaacatatggtgtgccatgtgcccatggactaggttttccatcacaggacagttctgtcttcgggatggctggttttccttttattttagcagaagtagagaaggccccttgggactggatctctcacttttgcaagttatgaccacaggggacaacttgggagtttggattcagatggaccgaggttccagagccagcctcactcactgttagctgtgatcttgaacaggttcttttacctctctgagcctcagttcattcgtacctaaaatagagggaaacttttctatgtcaaagggtagtagaaaggttattacgcattgactggttagttcattcctttgataattctttagacatgtattaatcaccactacgtgcaaggcacgatggcaaacattaggaacgcaatgaagtcagctttgattctttttttagtggaatttatgttcttgtaggggaaggagacaaaacaaagaataactaccataatgtatatataaactgattaattttagattgaagtgagtgctatgaagaaaataatgtaagagggaagaaacagttaatgatggtgcggtggatcatgatactctgctcttgagctcacatcctttattgtcttgaaatttttcacccattagctcacttgttctctttttttcgcttcctgggtttgccttagagacacctggtactttactctcccatgccctaaatacccatgtccacagggagcagctgacttactgtggtacaaggaatgtgcttttccagattttaggagccacctgtttctgggagtgccatggaaacacacattctgcctctcaatcttcaggcccaggcaggaaattttcagctgtcagcagctgtctttctgatctgctgccaaggagtttccaaccccaaccccaggaaaagcccacagtgaccctcaccagggactttgatgccattttttggagctgaaaaggaaggaggggctcctgcagagtgattcgtgggctcagttcttgacttggggtggctgagagtttccccttaaataatatgtcacgctgtaggcatatggtcttgcaattgcggggtgtatcatttccacttgattgtcaaagcaccccacggcagaaacatactaaaggatctctgctccagatacagccatggctttgcagcatggcagatttgcagctttgaggtggaaaacatttttcagcctttcccaagaggtgaactggatacagctgtgcagtgtaacctaaatctttgcacgtgtctttaaacagggcagaaacaactggccctgtccttccactctgggcctgatgatgaccaagtcggagagaactgaagctatatatcctgttctcagaagttgaatttccccatcttggacagagtagtgtgctgttgtgggaatgcgtagctattgccttactcaggtgaatgtcatctgaagacgtggggtgggtaagaatctgtcaccactaaacgcttactccgggctgcccatcactgctgtttggtcagtccttttgttctagggccctttgcagccattctccaggaagagtcatcctggccttgccttcagaaacaagctcgctatatttcccatgtagttctagaaagaatcctggtgcagggattctgaaggatgcactcttgtcctggatctgcccctcaatgtctgtgtattaatgagcaaattattattattattattttgagacagggtctcactctgtcaccaaagctggagtgcagtggtgcgatcatggctcactgcagcttcgacctcttgggttcaggtgatcctcccacctcaacctcccaagtagctgggactacaggagcatgccaccatgaccagctaatttttgtattttttgtagagatgaaatttcaccatgttgcctacgctggtatcgaactgctaggcttcagtgatctgcttggcttggcctcccaaagtgctgagactgcaagtatgagccactgcacccagcccataccacttttccatatggcttcaggttacaggtttgtgcatgagttacatagtggaaccctaaagccatacctttgaccagttgtctaaagtttttagcaccactactactgtatagctaatattttctttgaatggattcaatttttgtagcctaaattgattcacaaaaaccatacttttcgtctctaatttaactggacattcaccatcactagccataaataaatggtacctattacaaatgcattgatgaccctagctagaatggctataataaaaaagatagacagcaagaagtgtcagcaaagatgcggagaaattggaatgcacatacattgctggcaggaatgtaaaattccgcagctacttagaaaaatagttgagtatttttcttaaaaaaattactcagttattatgacccagcaattctgctcctaggtatatattcaagataattaaaaacatatgtgtacacaaaaacgtgtgtaccagtgtttataatagcattattcatagtaaccaaagcatggaaacaggctaaatgttcatcaactaagaaatggataaacacgagatgatatagcatacaatgggatatgttcaggtataaaatgaaatgatgtcttacatgctgtagtgtggatgaaccttgagaatgttgtactaagtgagtgaagtcagatacaaaggactacatattgtatgattcgatttatatgaaatgttcagcataagcaaacctatagtagcttaaagtagattaatgattgctaagggctgaggggagagagtatgggaagcgatccttttatggatatggattttctttttgaggtgatgaaaatgttctggaattatctggaatgttctagaattgtacaactatcaccactttcatacacagttgtacagttttgtgaatatgttaaataacacagaattgtatattttattttattttatttttttggagacagactcttgctctgtcactcaggctggagtgcagtggcatgatctgggctcgctgcaacctctacctcccaggttcaagcgattctcctgcctcagcctcctgagtatctgggattacaggatctgccaccacgcccagctaatttttgtagttttagtagagaaagggtttcatcacattggtcagactggtctcaaactcctgacgtcaggtgatctgcccacctcggcctcccacactgctgcgattacaggtgtgagccaccatgcttggcccgaattgtatattttaaagtgtgaactttgtggaatatgaattattatttcaaaaaatatgttgaaaacaaagcaatgtcatcaaattctttctattacctgtgtttgttgaaggtgtttgctgtattcaaggcctgttttccctcaggaaataaaacagaggttggaaagtattaaagaggtgttgttaaacacggcctagcaccagctgagactgtccttcaagcagccagaaaaactgaatgagcttggaaaaaaaactacttcctaaaaccttctaaactcagcttttcaaaggccaccaatgtgaaatgcttaggatttcattcaatttaagcactattaccgtgcccaatttttgttagctgtgtttatgaggaaagaattaggatattttagctggggaagatagcactctctggaaacatactgtgcgatatgacggccactagtcacgtgtctctatttaaatttaattaaaattcagtagccctcaaaactgtgccattgacattttcagtgcctaggagctacatgtggtttgtgttggttgtactagacagtatgatataggacattcattttattgctaaaagttctgctggacagctctatgctaaaagattaaattaattgtattgctatcttgtggtctctttgctctgctttccctcatttaagcaaattcgaatgctgaaacatgacaaataatgattataataataaaaattaatagttaacgtttgtacttgccctgtaccagacagtgtgctaagcatttaacgcatgaggtcttagttaatcctcccaaaactctaacaggtagctaccgctatcacccaagctttgaatgtgagaaaactgagcatcagagatgtcaattgctgaagtcccagggcattgggaggcctggatttgaatccccatcagttggctttgtgctcctcgtccttctaacctctactttttccacaaatcccatcccaggcctcagccagcaactcagagtccctctgtcaaggtctctgagaaattttacttgtcacgttttatcatgaccgtattttctcaggacagtttcaagaaataagtcagaaagcagagtaaagtttgtggctctgcctactgccccctttctcctgtcctacctcccacccagagacaatacctgctaacgatttggagtgtgagtccgaaaccctcccatacttttcctatgtaattacatgcataggtatgtgtacaaggacaccatgcacgtgtgttaagcaagtgggatctcatcacccacatgattttgctcattgcttttatttatctaacagcatgttttggccatctccccatgtcagtctgtacaggtccactctatcattctatattgtgacggcacacaattctataaacagtaataccatgatttatttgcccttcagcaaatggctttgccaattcttacacacaaaaaagggtatgatggaccagtttcttgcatctgtgctcaaactggacatcatcaatcttttaagtttttgccaatctgttgggtgataatttcttttcctttcaaccttcagggtcatttgcagctccctccacctgctctgcccaggcttctagctgctgacagccaaaggcaatctgccggaggcaaaatgaggtcaaggccaaaaaccatattttctttcagtgagagagggcatttacttgggtaaatacggcccatgcactgtgctttattggtttgaaaaatgaagaagcaagctccaacgagttctctctaatggggctgcatgtctccaatacctggtgctccaatgcattgattgacgcattgtcatcacttataaggtcagtatgttcatccaatcctttattcatcacgtaactatcaggcattgattccatgctaggcagagttctaggcactgagaatacagcactgaatagtgagtcaagacccctgttttacgggacttagattctaatgggcaggatggaggcccacacaggcatcatcgttatagatctaagcaacaaaagactgaaatgagaggtatgccccaagacacagagggcccatcacagagaggacagtcaggtaaggcctctctgagcatgcacactaaagaaaagaactgaaagcaagaaggagcatcccactgagaagaaagtgactggagagtgttcaaaagaagccaggatggccagggccttgtgatggaggaggagcctggcaggaaatgatgtcgggtggtaggtggggggccgattgaggcagggccctgcacagcatgataatgagtttggatttttatagaggtgcagtaagaagccactggaaagttttaagcagggcagcagcagaatttggtttattcggtaagctttacgttaagggcatttgaagttctgaagtgcatgaatactttgctttttaaataagacaaatacgttaaagaagtgttaacagttttcttaaaacagggacactctcacatggcttctgcagtgccttttccagtgatggaaggaagggtttggagccaggtttagtggacttactattatgcgtagtctttcgtcttcagtatctgggtcacagcttataaccaaagcatggcaagaacctccagcaaggttgatgcaggggaaagaagattgagatcaagtcttgttgcctctagtttctgttctttgtgtgaatgctgagggcccctctgtgcttggccatttcacaccagcagaaagcttttgggctcaggaatccagggatctatctgccttggaacattctgcatcaaggtaaaccagtttggtccagtagtgtcatgaccagagatgggagaagaaactgtgtgctcgaggtgctggggctagcatgtaggaacacaaggattttgaattctgcaagcatacacgcagttttgaaatcatcctgataagagtcggcaggagaaatggaaaaaaaaaaaaaaatctcttggatggaggatatcagtcctgtgggtaagaaggttcttggttatcatcattatactcccatttttcactacaaaaacatttttagagaaactgatgatgaaaacaaaagattccaatgaatcagaagcattgattaagcttaacagagagcagagtggtggtgaggtgcatgaattgcagtggaaccatccaggttttttccactttctttggcctcacctttttgccctacaactgtcctgcttactgctgtttgaagaaatgaaatccaaccacctccacctcttttcatacttacccatcttgttttgctgcatacattttgagccctatatgtgcatttcacccatcttcctggactctgaactgagccttgtttctgagccattttcagtctcttgcgcaggacttttattcagtctcggttgcaatgtcagttttcttgccctgcccatgctcagaggagaccaggctagtggaggtgcttcctgtgaccaagtggtgctttaactctttattttaaataattttggagcattcagcattgctccttctccccttccttactttgttactctcctctaaggcttcttttccattcatggaagatatttcttcagtctagttttggttcctctttaatttttttcctctctgagggaaggagttgctgttttttactttttactgtctctgtcttaatagggagggttactttcatctgcctgagaatcacgttatcttccatgtgggctaatgactagtgcagcctgagacctgagctcgaaccagccttgtagaagcagaacagtgaataggctgatcttcgataggtaatttacaagacttccacttcttactgattaactttcataactcactccagaaaataaattgtgtatctgttatcatcctattggatatgcagaagctgtcctgagagggttgataaacctttgaaagaatacataaccaagtcagcctctgctgcaaataaaccgtgacagagaaagagggtggccgtgccaccgaaagggacaggtgacagtggcatcagagcaaataatttgcaaattgtttaataaataatgataaatctctaagcagctcctgcattttattcaaggaaaattaagacttaagtatttttgtgttttttgttttttgttttttgtttttttttgaggtggagttttgttctgtcgcccaggctggagtgcagcggcgcgatctcagctcactgcaacctccacctcccgggttcaagcaattctcttgcctcagcctccctagcagctggaattacaggagtctgccatcatgctagctaatttttgtattttttgtagagacagggtttcaccatgttggccaagctggtctcaaactcctggcctcaggtgatccacccacctcggcctcccaaagtgctgggattacaagcgtgaaccactgcgcccagtctcttaagtactttttatatgaataaagtagtcacaggtggtaggtggtacagcaatgtttgtatgacaaagcccagaaagtagcagagagaaggaaggttatatgtgctcacgatgacttatctacataatacgagagaagtaactttctaaggacaagacatgagacagtaagaccattctgcccttgactctctaagacttggaatttcggatccataaagtaaaacatttctccttttaatagacaattagattaatgatgtttttggaatgaaaaaatctaagattagttgagttctttgctgcctccaccttccttcaaccttgactcacttggtaattgtcagctacagcatagccatctaaggaggtacagaaaactgtgggtgagttaaacatgttggctttgggtccaattcctagccatccgtgcaaatgctgtgtgacctttggcatgtctcagaacctctcttatctgagccttggtttctaatccttacctctcagagggacgattatgagaaggaaatgaactatcataggatatgtaaaatagtatatagctgtatgtagcatgtagctacatagcatatgtaaaatgtttatcacatagtaagcacctgttatatgccatctaattgtgtgtatatctgtgtatatgtgtgcctctgtgtgtttgtgtgcacatgtgaatgtgtgatactagggaaaataatttaccttcattaaataactaaatgctttttactactccctgtggagcttgatatataaggttgctcaggaagggagcagtaatttggtgggaaatagtcacttgtgtgtgaatcatctgaagtacccatccttgtgtccggatttggggctcttgagttaaaccactgtttgcttcccctgtccacaatggcttgctgtctacagcacgtctctccatcagcaatgtcaaggatgttttgttgaatctcaaatttaaccactctggacctggcatggtggcttacccctgtaatcccagcactttgggaggctgaggtgggtggatcacaagttcaggagatcgagaccatcctggctaacatggtgaaaccccgtctctactgaaaatatgaaaaattagctgggcatggaggcatgcacctgtagtcccagctgctggggaggctgaggcaggggaatggtgtgaacccaggaggcggagcttgcagtgagccgagatcgcgccactgcactccagcctgggtgacagagcgagactctgtctcaaaaaaaaacaaaaaacaaacaaacaaaaaaaccactctggaaaatcactttttttaattacactatatagtctttctatagttgaaacaacttaaatattccctccccctatgatgaaaatgggattcaaccaaaagacagatggatggaactttatctcatgtatatactatttaatacgctacatgcattctgcatgtcacatgctatatatagcatggtattatgttgtaattacatttaataaacctagaaatgccccattttttcccaatagcctagaattcttagaatagactcaaaatgtgtcacatgttagccaaactgtggtcaactgaaaacagtgactctgagaagatcagaaatggtggctctgctgcttcatatgtggctgaaataaatgaagtggtctacagtgtgcctgtatgtatgatgtgggtgtgcacgtgtgtgaatattagcgagaatgggagaagcctttactaattcttgaaaaactcacataacccatcctagctacaaccttcctggtatcagaaaacccaggaaggtaacgggtggcctgaggaccaagcctgtgcctagggaagtgaggtgtttgaaaggacgtttcctgtaggccacaacaaaggcaaaggaattatccctccctatgatacaaagttcctctcccttgcttggaatgcctgtgtccctgggatctgttgtaaatcttctctggataatgctgtcaacacacagccaatgtcccacacactgggatctcttttttcctatctgtgttggccaagtcttcttttcactttgcctttcttcacacagtgccattaattaggcttgtacattccagccctgcctcccagagatttcccaggtcaccttgacatcttcgagtatctatttagagtccctgaatgtatccttatccttggagagtctcatccactgcgtatgagtttttcttctttcattccaaaggcaacctgagtcctcagcctctgtgtgccatgatgagaaagaatgaatgggaatcaacccaaccaggaagctggctttgtggcgtggtagatgtttgtaaactctgcctgctgggggtttcttggccattgttgaagaccacaagcccagggacagaaagtggacaccttcctccacctgccagccctctttccaagcttctgctcctaacctgggtatgaacctgctcagtgaagccagtttcgttttatgcaggttctgggctctgaaggcctgtttgtgtcattgcacactttgtagccattccgtctcgctgggcctgcctgtaatagcagtgcagcttctaggtggcacttagaggatgcctaaattgacttagaaagctttgcattaagcagatgtttgctcttggggaagattaaaaccattttgcatcaaagaacgaggctgcggcacttccctaaagcttgaaagaacggtttccttttacttggctgagggttacctggtcccctgcttgacaccctcctagtccgtgaaatggagtaaatccaggttagaccaggtgagtccgaaggtggcaggtggctaaggaggatatttcctttgtagctgttcccggccttgtttctacttatagggataactaaagcaaccaaacacacaccaaacaggtgggagacagcagggaaggatgcttggatatggctgagccacgttcctgcctggtagtatgagaattcgaagatgcttgaggcatgctggtgaaagtaggcaaaagcagagagactcgaggctgcatcaaggggcaaaccgtgtgtatgtttgtgtgtatgccagtgtgtgtatgtgtgttagtgtgtgtatgattatgtatatatgttttgtgtgtctgtgtgttagtgcgtgtgttttgtgtatatgttagtatgtgtatttttttgtgttagtttgcatatgtgtgttagtgtgtatgtgtgtgcatgttttgtgtgtatgtttgtgtgtatgccagtgtgtgtatgtgtgttagtgtgtgtatgattatgtatatatgttttgtgtgtacatgtgttagtgtgtgtgttttgtgtatatgttagtacgtgttttttggtgttagtttgcatatgtgtgttagtgtgtgtatgtgtgtggatgttttgtgtgtgtgttagtgtatgtgtgttagtgtatgttttgtatgcttgctagtgtgtgtgtgtgtttgtgtatgattgtgtttgttttttatgtgtttgtgtgttttgtgtgtgttagtatattttttgttagtatgtgtgttttgtgtgtatgttagtatgtgtatgtttttcgtgtgtttgcgtgtgtgtgtgtatgttttgtgtgtatgttagtgtatgtgtgtttgtgtgtatgctagtgtgtgtgtatgtgttaatgtgtgtgtgattgtgtgtatatgttttgtgtgtatgcgttagtgtgtgttctgcgtgtacgtagtatatatatgtttttgtgtgtgtttgtgtgttttgtgtatatgttagtatgtgcatgttttttgtgtgtttacatgtgtgtcagtgtgtagatgttagtgtgtggatgttttgtttgcatgttagtgtgtgtattagtgtgtggatgttcttgtgtatatgttttgcgtgtagtatgtgttttgtgcgtatcttagtatgtgtatgttttttatgttagtttgcatatgtgtgttagtgtgtgtatatttgtgtatgcatgctagtgtgtgcatgttcttgtatatatgttttgggtgtatgttagtgtatgtttctgtgcgtatatgtgtgtgtgtgcatttcaagtgttcactgccagagaagtggcttatcagtgggtcagaagacagcatgtacgttttataatgtaccagttaagagtccagatgtgagagtcagatattgctggagtcatttcctaactcagctctgcactagtgtgtgaccttggacaagtcacttagcctctctgagcttttgtttcctaatttttgaaaaataggatgagacccacatggaatgtctcctgaggcttaagcaggatggcctgtaaatcacccagtgtggggcctggatcattgagagcaatgggatgcgctgatggtggtggatactgctgctcttacgctgtgactgctggggctgttgttgctattttcattatgagaggctttgggagagacagaactgcacaacggattgccgtcagcctccatcctgagttcctggggtctgggttctttgtctgttgtgttactgggcggggggaaaacctccagataaacctgtcaagctgttgagaaatcctgtctcccatctaactacttgtgtgttacttacaacgtgtgagacttaatgacttcttctgtccaagggggtaaaacaaagccaattgcattaccttgccatgagcagccaatgaaatggctagcacagagccgttagaacagtgtctgagccagattcaatccttcctccgaggtcacccctggagctaataaaggaaaaaaaaaataagtaaaggccgggatcttgtgggcctctcagcctggcaaagtgcctggcataaaatgggtcgcctggcttttaaggcagtgtgccgagcagctggggaaaggtcatcatgagttcacagaacctttaaacacactgggacttaaagccatcagatcccttttgctggctccatttaagttgttttgttggaggacaaaacctttttgcttacggctaagtacattttatggagcatttaatgattcttctatagacgtttgagtagctgtgttttggtttcaggggccgaaaataagtgcccagaatctcccgtcagtcttcttgatgtttattatctgggtggagggggagggacggggctgcttagcacatgttggcttctgggcttcattgttggcacttcagcagaagtgggaagaggcatatggccttcctggtgtcttatggtgaggaaaagaggacatttgaggggaaatatttttgaacaggaagacagcaagatcgtatttgtaggtgcgatggaaaagtagaacagccagtcagctttgggactcccaagtcctattaaagctcacatcttttcaaagcattttaaagattaggaatccatctctccctgtctgttggtaatcgtggggtgcaggagtctacaacagctcagcttacgtctgacgagctcttgtctgttacatcagtaccttgggatgtgccgggctagcggctttcccatcttctaagcacttggctgccaggaaagacggaaccctttgaagtatgagatctgtttatcttgcagttactatggagaaagggccctggaattaattgtaggttattgaatttgtcctttttaagaggaaaaaaaatgactacattatggtgctaattcatagatcttgagatgctagcatttttttgtgcgtgtttaacatttcatttgaccattattagcagtatcaggttgggttgctgagtttcaagtactagaaatctacttggactatctttggcaagggagagcatttattgggaggatattgagtagctcacatgatatcaagaagaccaaaaaaaaaaaaaacaaaaaaaaaaaacttggatcccagaagagaattattcagccattagaggctggctgtagaatgaatgccttttcttctatctgaatgatcctctagtcactttttctatcatcagatctctctggttaaaatttgaagtcccagggcagggaatacttgctagttgtgttctctctctaaggtaatctgttggaagaagtcagaagaaatctttagagctcccattgtgagggcaacatacttgtttttctgcttactaacaaggaagagacaatttctgtaaaaggatatcaagatgctgttaggaaggtgtaatggatactagtgaatgtgtcaattagatgccaagcactctgactgttgatacattcttgagacctacaatgatcagatgattcttttggggaatctatctgtctgtctgtctatccatccgtccgtccgtctgtccgtcgtctatcaatcatctatctatcattcgtctatctatctatctatccatccatctatccatcccaatacaaaccatatacaacctcatgatggatagggtttcaagactactgtcacgatcatgggagactttttctttcctctttttaaccataaacatctttgtgagatataaatgtcattagaaaccagagaaacagatgatacactcaatggggtaataaatatgtaaaggaccttgccacttattttgtagcagggaagaatgtagagtatatctgagactgagaacctaaatcaggacttacctttttttatagtctcagtccatccaccaaaccatagccatagccaggcaggacaaaagaaccttgttagttattaatgttgaattgctgtattaaaattctttcagtgagtgattctcaagaaggagtgatttttttcccccccacagggaacattcggaaatgtgttaagacatttttggttgtctcaattgtgtagagtgatgctgctgacatctacgggatagaggccacggatgttgctaaacatttgccaaggcacagaatcttgtgctgatttacagcatcatctttgcaaacattaagatggcagggcacagtaaaggtactttacttcccacagtacagaattatagcacccaaaatatcaagagtgcagagatagagaaaccctgttttagtaagagatgtaaacacaactcaagtcagtgtatgcaaagtgatgactcaacagggaagatacaggtatctcttacgtgactacatccagggtagctgggacccagggaaaatattaataccctaagactctccttctttgtctcctttctttgtgtcagtttcacttccacaaactagcttcctgcacatggtgggaagtatggctgctaatagaaggtgggtgagaagactcatcctgtgatatcagaacagaaagactctgtgtcagaaactcccagggaaggttttgattggcctggcggaggtccagggctcatcactgagccaatcagctatggcctaggtgtagagctgggtcatgtggcacagacatggcagctgaccctctaaacagtgtattgaggcctttcccagcaagaccaggatgattttaagccaggctgccaccccattggtgtctgctgccattgcatgttctcttattgccaggacatttgtaaatccgatgttgtttccagcagagctgtgtcagagaatgtcacttagccattgccagatcgttgagcaccctggctgaaaatcacaaaggcacggcacctagagaggaaacgaaggctgtgcatgtttccagggaagctgcgccctgacatttatggctgagccgagtttggccttgaaaaaaatcatccggtccagccttctgcctccaggcttgtgaattgataaaccctccaggacagacaggctgttgaggcacagcctgagatgatttctgtccttcctccctggtccaaccatggaggctgccttagtcggcttgtgtcctagttgatatatttgttggaatgtatttgaaactctggtcagtttctctgatgatattgatagttttcttttttttttttcccacttagatgaaatttgtcaagcctgcattgtgctaagccctattaaaatggtgccagagacccaattatggcagctacaaagccgttcaagagtaagcagagaaaaacacataaagggattaaagatcaaaaatgggattccagtgaaagtacattaggagacatcaggcagagacacatgaaagaattagaatatgaagaagaaagcgcatagagcttttgggatgtccttacttttcatccccccaaatcatttaattttgagcatgtttactcttttaaaaatgaattgaaatgatcgattgtacttttgtcaggtggacatgtttttaactctggtgtgaaatgaattgcagatgggttttctggcttgattccctcccccaaaccccccagttttttttttctttttgtcttagacaatatggtgtcagtgaatcatgaaatactgccggtgagcccatttagtgagttgggaaagatggtctcctgggctaggtggtgttggcaatgacactctggggaatggctgaggcccccacccccatcttactgtttgcaaagacgagactgtaaatcagcacaaagtgtgcatttgagagttgctgttttgagataaagagtgcagttcagtttgtagtcatcatcatgttggttctgaagaagtcctgtcacaagcagagctgcacagaatcaggtgtaaatctgtcattttggctagtcttcctctggtccctctctcttcgatggattccatgacaagtccttaggcacatgtttgatttgcactctgttgtttgctatagaaatgtgtacgtggcctctcaggaaagagaagtgaccctctgcctatatcatcgtgaaacatctcttccaggtttgcattctggagttaatggaagagatggaaatctaatcagctcacaatagtctctaactccagactctgatgctcacaacattctgtatatgtgcatcagtcagttcaatgggaatagtggagaaacagagaacaaatgtcccatcccatctgttctatctaaaggaggcagcttctccttagctgcagtcatttttttcaatgcaatagtgcaggctctgcgttgtcagattttctgatatttcaaaagaaggtaaaaatccagatttttgtggggatattcattatgatgatatatatatatgcatatatatgtgcatgagcacgtgcacacatgcgtgcatacacacacacacacacacacacacacacagacactacacatgatcaaacacatcattagcccaagggtcaccagtttataatctttactctaaagagagagccaggcatggtgtcttatgcctgtaatcccagcattttgggaagccgaggatggtgaatcagctgaggtcaggggtttgagaccagcctggccaacgtaatgaaaccccatctttactaaaaatactaaaattaggtggacatggtggcacacaccagtagtcccagctacttgggaggctgaggcaggaggatcgcttgaacccgggaggtggaggttgcaataagccaagatcctgccactgcactccatcctgggccacagagtgagactgtctcgaaaaaaaaaaaaaagagagagaagaaaggccgtaagtatttttcaaattagtgtttgatagtctatccattttggggtttctttccctgtttatcttcaaaagtgccatattttgaaagtttacgtattaccagaaaaccagcatcattcatggagtctttatatgcttaaaaagttttcttggaggtctcgaaacacccttagtcttaattcactttaaaaaaaaattggagccgggaacagtggctcacacctgtaatcccagcactttgggaggccgaggtgggcagatcatgaggtcaggagatcaagaccatcctggctaacacggtgaaaccccctgtctactaaaaatacaaaaaaaattagccaggcgtggtggcgggcacctgtagtcccagctactcaggaggctgaggcaggagcatggcgtgaacctgggagacagagcttgcagtgagctgagatcacgcccctgcactccagcctgggtgacagagcgagactctgtctcaaaaaaaaaaaaaaaaataaaaataattggagtgtatgtccttctacagtttagggaattaatggtgagaaaagcaagccagacagttatcttcagattaagtaacaaagaaagtgccctctaatggcctgggaggtttcattcattttttgtggaatgagaagggaggtgaatctttcttttttttaacacaatgatcctgcagctgagcaagaagtgctagatgatcctcctggctcgaacaggatgatggtgaagagatagcatggtggtggtagaagtcgtaatgaaggtgaaagaggaatacagaaaagaaggaagaaggaggtttttcacaactcagcgtggattggggtatcccactccggtgggacccacagtctgcttaatataggagattgactccaagtcttgccaccttcccccagcccaatagtaaaaagcaaacacacccaaacaaacagaaaccacgatgttcctgcagctctcgggggctgaccatgtcttccagaggaagctcaaagcctgttgttgcatgcttcatccagcttttctgcaaagtggaggccctagcaagaagcaaaggcagacagatggtgtcccgcagactctccctcaagccctttcatctctcctctcactattaattcatctgtttggatggatatgttcacgcatggaaccaagatgaataataatgaggtttttaataactccctgcatttgcattcctagttactctttacatggttctagctgattaaaatgaatcatttacataattaacatatggttatagtgttggctttaatatgctgattatctcaatacttttgtctggagtcaattggattctaactgtaacaattgtttgaagtgagactagtttattcctgggaggatggaggggctatttgccatggtgtctgattagcaatagcatacctttccaacaagtttgttgtgcttctgttttgtaatgtgattgaaaaataagtaaataataataataattgcagtgatcataatagctcccattaattctgggacaagtactatcaatttcattatctcactttcttgcagccagcctgcaaaacagcaaggcttatccccactttacagaggaagaaattgaagcttggaaatgttaacgggcttgcttgaagccaccatgctattatgtgtcagagccttgagctaggctttctgatcccagaattcatactttttaattactctaagtcagcttctgaaccttgagactattgacattttcaagcttggcactatgactatggccagaaaattctgttgttgaagggtttccctgtgtactgtaggacaattggcagcaactctggactcctccctgtggataccagtagcaccccttccctcattatgacaaccaaacattgccattgtcccctggggaggggaatggggtaaagtggccattgattgagaactactgctctaagttattttcttggtacccattaagacaaaatactaagaagcagacatgttatctaggttggtctttcagtgatgggtaactagggcctaactgcagtaatggtatttggaggtacattgtgatgtgtgtgactcctgtaactgattctgaattttccaattatatctgccaggaatcactgtatttgtcaatcaaagcgatctttgttttttatcaacgcgggtaagttctgtctccctcactttcccttcttcccccacgctccctccccactctttttaactcctctaaagggcatgcttgatattttcagatgtgctgccttgcagagttgatagcatgcatttcaggataccattctctcattagcacatcctaggcatgggtgccatccgctatgatctgattatcttgctagttcatattgaatttgaaagggacttgtgaactagtggccagttttcctgtttaggtacccgaggttttggaatgtgagtgctttctgaacattcatgcatatttgaaacgcatttttgctaattgcaggactgttgtccacaattagtctttggtaggcatgattaattgcaaagaacactgacatttatgcataaaatgcttgaggtcaaaaagaaatggagagaaatggtgactgcagccagggtgagtggaatactgatgcatggtgaccccagaagcaaagccccaatcaggaaattgtagcatcagcaggacaggtattttattgggatggatgtgtctgtatttttgacttgcctgtattttgttctcctctcctctaagcacctttagttttacgcaggttttcagaagcctgtctgatgttttcataaatgccaaggcctgccttttactctccttctgcccttctccctcccaaactggccccatcacttgaagctcataatttacttctttaacataacatttgtgtgttgtatgtgtcccaggaagaatcaagaagtaaacaaatgtgccacagtcctaccactgagattaaccagtaaacttttttttctgcttaaagtggtacgtgcctgtgattaataattcaaatgatgctagtaacggaagacgggaaatgaagcccatctccaaatcttggatcttactaaagctaatcagtatcagcggccattaggagaaagaaaaaagcaccattgtgtatagatatgcacatatatggccaggtgcggtggctcacgcctgtaatcccagaactctgggaggatgaggcaggcggataacctgaggtcaggagatcgagaccagcctggccaacatggtgaaaccctgtctctactaaaaatacaaaaattagctgggtgtggtggcaggcgcctataatcccagctactcaggatactgaggcaggagaatcgcttgaacccatggggcggaggttgcagtgagctgagatcacgccactgcactccagcctgggcgacaagagcaaaactctatctgcaaaaaagaaaaaaagatatgtagatatatgatacatacatgtgcatacagatatatgttgttttcacatactgacaaaaaaagccacatcagtctaaatgccctgtgtgactttatcttgcttaatttcacttgatgatatgccatggagcctccttcagtttttctacactaggtggctgtgacataccttatttaagtcattcccttaattcctttttttttccattataaacattactgctacacatgcatacactgagttatctgatagagatatttaaataaaacatatatatgggccctgattactttttactgccatgttaatttcctagcagtgtgattgttgggtccaaaagttggtgtctcataacttccatttaaagatgtgattcaaaacttacctcctactatatataatgctattcaattcacatcactttctcaccatcagtgcagacatcctatttgggcctcggagctggagttcacgtaaggatgagtaaccacttcatacttcagatcccatgagagcgggatcatgtcggtactagcaggctctaaaggacacagtgttcaccctgcttaggatcagacaactgcctagtctgtgccaggcatctgatacttgccttggtaataggattttgcttgaagttctccttatgcctctttatttcttttatttatttgtgctgacaagttagagtgtaagctcattgaagcctgtggccatgtacagaaagagaggtcacatcttctgccaaccctgattgattagtagtggctgttaggagctctgtctggagaaggattgcatctgacttaggaagaaggagtttcagaatcaattagtaatgtctgctaagtgcacagaatggtggaggggcagcctgtgtccccagtattctttttccattcttccataataaattaggattattattatggttattgagggcttacagaaaatttttgaatcaatataaaaagcagcaatgggaaaaggagaagagagggagaaagggagggaggaagagaaggaggaaaagagaagagcaggagacagagagagagaagttatactcaaatatacgaagaatatcttgcttctaggtggctttatatttgagcttttctatagttttgaaatttataggaatttaaaaacatagaaattgcatttttttttttttgagatggagtcttgctctgttgcccaggctggagtgcagtggtgcattcttggctcactgcaagctccgtctcccaggctgtagccattctcttgcctcagcctcccgagtagctgggactacaggtgcctgccaccatgcgtggctaatttttttgtattttttagtgagacggtgtttcaccgtgttagccaggatggttatcgctctcctgaccttgtgatctacctgccttggcctcccaaagtgctgggattacaggtgtgagccaccgcgtctggctgaaattgcattacttttaattctaaaacaacaattagttttgcaccaacctaaggaacatacgttacatttgaatttagaacataaagatcacaatacatgttatagtaaagacagtcttttgaagcaaagctacaggtactattaagaggcacagtgatcctgagatgggaaatggagggcagttctctgtcgttctgcagtttcttggttttgtgagaccactaagtgatgtccgttctctcctggcagaatagatggtgttaatctccagtcccttgtaataaatgctggactgtgaacaggagatggctaaaagagagtgcccgggcaagcctttatctttaataaggtccacagccagtctataattgtcagaaatgacagaggaaacagggcttctgctattttgctcagaataagaagtggtgtctgacctgtgttggcagcaataattgcaatggtcagttattgaagttgatcattgcaatagttgatacaggggcccagctctttgcgctgatattgaggaagccaccaggccccacactttggggtctggaaacattcacagagcaacttttttcaagaagatggacacattcacgttttaaagatgctcagcttctcgtgagagagagtttaggtacattctcattccactcaaatcttagcttataacttaggctcctcgtagcagccctttgcaatgaaactgtatcacttttgaagcttagcagatgggaattgtcataaatgatattttagtcacagatatgagccataaaacttgaaagataaagtatctttctgagacacacatggagaggcagatagacccagatacagcgtgagcttttctgcagctctgatggtgtggaacgaagggccaccaataggtactttattgcaggtgacagggtttgcagatgatgtggaatagtgggaatggcatggagcatgaattttggggattcaatatggggtcaaatatttaccatcccgtggaatcacatttcttatctttttctgaggctccgtgttttcgctgtgtaaggggaatagcggaatgtccttcttaaggtgtttggcacaatacagataaacactaaataaatattcctgtctgtcctccctacagcattcccctcaaatgaatgtgttgcttattgctagttatgctggattattctgctcagttgaataattcattagggcttgagttccaagatatggtgtaactgtatccagcagactctagccttaagccaatatgtatattaatgctttttactcaaggaatctacctggctcttagcaatcctaaccccacccccacatttttaacctgacaggaagattaatctgcatgagatgaagggtgattgtcatgtccaaactaaaaacaaaaaaattaaaaataaaaaatgacagaaatcttctagaaatacctaaacattccctcttttgtcttcaacacgtactcggtccccttcttgtgctcccaggagtcttttaatgcctttgttttcacagcatcaagatatcctggcaacctagagttaccgccatgaggtttggccaccttatctcaaacaactgcgtattttgaaataggtggtgatagcatgcttttcattccatccagaaagtgtctcttccatgacctgccagcactagtatttcaagacctctgcacttacaaatttaaacggagcctggagtaatttaaattaatgtgtacaacatctgtcttggtgagaggagatgtagagatattctccgtttatgcccatctggctttgttagagtagataggcgtatgtttcaggaggagaaagaacattttttatttctgctatgtttcagacattatgctagccattacgcattatcctgcttaatcttttcagtaacgttggtagattaatatcattatccctaccctatgataaagattctgaagatcagagaagtacatcgtttcagtgaccaagtcactgttaaatgacacagtctgtattcaaagacaggacagcctgattccaaaactacttctatgccatcttattagtctcaaggtaatacaagtctaatgtgtttttgcttctgataattatagcagtaactacttagggtaaattaaaatggaatatccaggaaccccattatggtggtaagagtataaagacaaattagcggctatggaatctcaatccaggaaagagagacctgcattgggctcccatgtgttacgagaggttttgtttttttgttttttttttttttaatcatcagatgttttgggtgttcccagctgtgcttgagtgcatttgagaaatgggtttatactcttctcgatcccctagttcttcccaaaaggtagataaggggactcacataaacagtaactgaaagtcattctgtgtgacaattctgtattccttgttgttttagtaaagtttgtcctgagagcaccttgcctataaataaatacagtgacaaataaaatgaatgatttttctgggttcctttcctactctctctccccccatgctttaatgaataattttaatctactttgtaattaagacactagcaataattttattatttggtactacttgggaaaagtaatctttgatatgagatactttgcaaagggaagaccttgtgcccacgtcctgccttaaatgcgaagtaaaggggaaacctggattcaagaactagagccattggtaggccaaacccctatcccacaagccagggaatgggatcttttaccagacactcagacatgaggtttggttttattttttattgttctgaaaagtacattgtaaaaaagggagtgtacatttctaaggcacttttctaaaacaacaagaaataatacaaatatttagtaagcaagggatgattgcatttttggaacatatatgtttatgagctatgtcaatatatatgttgatgtgataccatgaaagctgttttagatgaaattctgataaacagggcattatattgccacttacttgctcttaattcgattctattagcagctcagctttattaaaatttctcaaatgtattccatgtgaaatcattttatttcatatcgctaatgtatgactcaacgcagcatcgcctttgaggtgatccaggactttcatccccatttcacagatgagcactggagataagaacaggttaagtgatttttgcctgaggtcaaacatgctgggagaaagattagaagttggtgagtgtttaccacagctctgtgtctgtgataagtccctaaattcagattttccaacctccgagttttctgggttagacctccagctaactaccaggggatgtcatgttatgtaattaattacaactgtaattatcttggtttctgggtcatttgaagatcatcggtgctttttgttttcatggttcatgcagcagaggaattttttttccaaagtacaagtataattaatccaggttttagactcttaaataaccggaaagttaaaacgtcagtgcagaaactgagttcatcttggctgatgtcccttgcagtagagatggggagaattcagagctgttaaaagtcgtggtcatctctcttgaaacataaaacttccctaccagtgtctggatttcctaggaggtacccagtgcatagacccatgttgtatgaatgactggcctcatacaagaggtaaacatagtatccttgtatgtccctaagtgtcaggtggttgcttggaaaagcagtgatttccataggtccctgtaaagatttcttcaaaactgatggaaggtataaatgtttaaaattagctttcagtttccacttctttttcatgatatcttacatgaaggtaatctattgaggaaattaccttttatatcagtttaaatgaacttatttagataaaataccagtttaaggcattcttgactttgttctattccattcatggagatttgcttgacaggaagtgctctggcatatgtcagtgacctccaatgctcctggagcagatgatactgggacacaggtggtccgtatcacccacgtgaggtggtggcatgtatttatgtgctgaaccaatcggaagacatctcattcagaagaaccaggcctgtttaccttattcgtatgtcattataggtgacacacaggaagagtttctgaagaatcatttcatcattaagatatattcaatatgacagcttggctaacacatcaatcatttggaaaaaaaatactgtagtaacagcctaaggagaatttaaacccttgtgctctggaatctgtatttgcagggcaggaaaaaatgttttagatttgtctatggcattattctttatcagtataactttatagcgcttgaatgtctgaaagatgactcattcatttatttgtgtattcattaattcattccacatatatttgtagagaacctatctgggatctaagaacaatttcaggcaccagagacacaggggtaaacaagacgtctaggcccctgctgtctcagaacttaaatttagtgggacagataggtggtaaacaaataagaaggaattgagagtaacaagcacagtgaagtgaaatatgccaggtgatgaaatagcaaataggagattgatgctcccatagtttggagactcagagaagttttaaggaggtgatgttttagctgggacaggaaagaagacagccagggaggtatggagaggaagagcacggggaacagaatgtgcaaagtctctaaagttagaataagcttgacatgtctgaagaagagcaaagagactccggtggctagaggattctaatggagaagtaggaggcagaaaagaataattgagaagtagatcagtcagatggaggaggactttgatgggcggcagagtaaggcagtatgagctttatcgttgctgagccggaagttgttatgttatgcaggaagctgcgatgagtgtgtacacaaaccatctcctgatctcgagccttttcctcctgagggcaaggaggatcgggaggcaagggaaacgtagtggtgatgacgaagcttctatctttcagggtctacggtttagggattgagagtatgtgtttgctagcgagacctcacgaaaccaagccccctggagagtccctgacaaggacgaggtgcaacactgttagcggaatccatttcatcgcagaactgctgtcttccaagccttctgagccggctggtacttgtgtaacatttctgtcttgggtgatttccaactggatatgtcatttctaccaagccagtggcaactccagcctagggatgcatttaatctgggacatggtggtgggagaagcattaggcacattgtttttcttccttttttttgaagaatgcttggtacaaattcagttttgacctcccaatgtaggcttttatttcccaggcacttcctttttccctgcatccgccaaaccctggtgagctttctgctgcttttctcaatggctgatctaagtactgcagaacacggacactcttgggcacactgcaaagtcagcctggctccttggccattcctcttgcagggcacaaaaggaccttccaaagaggtggggtagtgtattattaagtggcaataacgaaggacttctttagattatcactgtttcaccagaagacacaacaggagagcacacagaccttgaaggaaatcccaccactgacatttagaatctggtggactgcaagcttagatatctactctctaaatgcagttactttatctatgacctggcaatattaacagtacttatctcatagaaatgtagtactgggtatgtttctggccagtcataaacatttaataatggtagccaatgtcatcacttgttgttaatagtggggatagcagtaaactctctttcctctcaaggttaaggggagtgtttggaagagaaaaaaaagctgagactgaatgacgtttagctttttgatttcaccataaactaaagagtttcattggtaactgtgccctgcctctttctgtccaaaagagtatcttatttttagactgttttaaaataataacagtattatctgatggaggagacaaaaatacttcagtaatagcctaattggagcgaataagaaaatagaacacttgtgtgcaatggaatactagaaagcagtgggaatgaatgaattggagctttatataagaagaatggcttctgccattatgactgtggataatttactaaaaaatttaaaatacactggagttttagtactttctgctgtccagaaatgcatacatatgtggtaaatatatatagacaataaagaaactcaaaattcaggatattgtctgttgtagaggtgaggcagagggctacatctcaggagggttttagacagggtatttagccacactgaaattatttcttaagctgggtagtaactacaggaattccttccttccttcctttctgcctgcctgcttgcctgcctgcctgcctgccttcctgccttccgtcctgcctgcctgcctccctgcctgcctgcctccctccctccctcctcttccttcccttccttcctcttttctcttccttttctttctttctagatagagtcttgcctttatcacccacctgaggtgcaatggcaccatcatatctcaccccacagccttggcctcctgggttcaagcacaatcctcctgcctccttctccaaagttaggactaaaggcacacaccaccaaaccttgcttattttttaaagaaaatttttagagaagagtgtcttgctatgtttcctgggctggtctggaactcttggcctcaagtagtcctctgacctcagcttcccaaaacactgagactacaggtgtgagctgtgcctggccagtatttatgttttgctgtataccttttggtatgtctgaactatatcacatcatgattttagagtcagaaatgctcagagtttagaaaataaccatcttcaccacatagaatcgtataaaataaaaaatgttttttctccttccctttcttcctcccccatcatttaataattgtttagtacatacctttgcagatattttgtgcatattaaaaatatacacatttagaacatatatgcttaatataaatgactttatgtctatgactctgttaccacttaaaaatagtgtacaggcttttcaatgttggcacatataaattatgtacttcagtcttaacatctgtctggtaatcatctttcagtgtactgtaatttaaacaaccagtttccctattgatagacatttgtatttaaaaaacaaaacaaaacaaaaaccagtttccaaactctggtctgctttcaattcagacgctggcagcagctcacaccgctgatcatccaaatgttttgtctttgctaggacgataacccagtcgtttcatacaactgttttcgtttgcacctgaatattccatggctatagccacagctagaaatccattctctaggggaaaataagaaatgtaataataaacttaaaatccctaatgagaaattcagatttcatagaagcaggggtcttctccctcttgctaaccttcttttccaagatgttagtgtttttcaagaatcgcaggctttttaaatgtcctccgtaaagtgtaaaggggaaaatggagagaaagaacagtattttgaatctccagagttctcagtgaaagtagacaggtctatcctagtgttctgtcttgcatgaaacactttcttggtattttgtctacatgagtgtttaatatttaggtcatagtttgtgaatacactggagatgttatgcgtcaaacaaacccagtgttctggcttcacagcagagtaaacagacacagatagttctagatgcttgaacttctcccacgttaaacttaaaacagcctctcatctcagggcttccatcaaagggattgaggccgtgtctctcaaacccaggtgcaagtggaaatttttatgggccctgacttttcttgttgtccttgttggctcataatattgccttattgtgcaagtaatgcatataacttgtgggaaaaggtatagtactataagtaattagaaagaaaaccatatttgaaatttaaaatccttaaacacatacctaattcctactcttcctttctgaaattcctgttttctcaatgatctgttagtaaaatatatagactacaaaaatgggttcatacatcgttcccccccgccttttttttttattttattaacagcttcacagtgttctgttgcatgaatataccctaaaaagaggatttgttttggcattggtgcctgttctttttcagtgttattcattattttgggatgttgcttttattatttttcatattttattttatttggtaggaaaaatgcaaatgtcccaccgtatggatttgggatttgcaagtcaggaacagtgggcacactttcccttaatggttggcgtaggcatttggatactgaatttactgtttatatcacggtttctccaccttggcagtgtggacgctgggctggatcattctctatgtggggactgctgagtgctttgttgggcatttggtggcatctctagcctctcctgactaaatgccaactgtagttctccccacactgtgatgcccaaagatgtctctagacttggctcactgtcccctgggggatgaaatgtttctccctttgagaatcctgcttttacgcgattggattcttaagttgtctgaaggatgatcttttcttgtagcatttataaatcagttggaagttggttctggattactgcctaaaataaaattcaacctattctgagaaaacaatatatttgagtagggactaattacctcttttttatttcaagtgacaaaagccaatatatcacacttagccactatgaagactccatttcagtaaactaattaaactaatcctatctggactcattattctcagttccactaaatattttaacagttgagatttatctcatttcataaattatatcatacttaaagctatccacagccctcaagagtttattttggacttttaaaaaatgtgactttaagctgctctggaatgtatatttttcatatcttttctagataatcattcaccttgattatgactaattattaaacatgatatatggctttaattaaatgaaagtacttggtttcttgttagcgcttattaaatactgacagtgttacaaagatagtgcagcagaggaaatggcataactcaccgaattgattccattttcttgctgtaagccagtgaagatacacattttaagagactgattaatgcgcaagatggcaagaacagtgtttttcatagttaaaaggaattaaaatctgtgtccatcctggattcattttctaacagaggatagtcacctaattaaaacgttaatacacatcccgctatttgtatgtacgttccaaagccagcatacattaaatagaaatttatcccaagtgcttcatggagaagccaagaggaataatgcctaagtaccacttcagagtaaattgctccctacttataatcgtgtaatgcaattaaattgaggagctgtaagctgcctacatcaagtatgtttagtttagatatttgcctttagacatctccctgtaaagggttccacattgaagagaaaagaaggaacatctagccaatgagctgttcattaaacttgacatatggtaagcaaggccagaaaatgcctaaagagtagagaattttctttggtatctaaagaaaaaaaaatgcaatatccagttgatcttagattctgattctagcaggtgttcatggtacagtcttgttctgtgcttcattcaagaatgggaaattcttgtttatcccgttgtccatgatgtgcttatttctcatggcatgcctgtatcaaaacatctcatgtatcccataaacatacacacctactacgtacccataaaaattaaaaaaaaaaaaaacgtaaaatgcaacaacactaggcacgcattttataatataacttctctgcttggacaaaattaggctccccagtggaggcaaaaacaaaaaaagcagatggcaaatatgttagtgacattgttttaagtgtttgaggtcatggagtcttcacattgaaataatctcttgaattatctgagttttaggctagccagggccaaggtgccagctgaattaatgaaacttggaattcatcttttgagttcccagtgaacatcaggaaatactttcctgacatattgacctccttattatccatttcccattctccatgttgaaaaccatttcatatttgagagctgagaatatgacaccttcatgataaatttaaaaataagatgcaatattattccagaattgccttaagttcccattctgtatattaaacgcctattcaaagggtattcagatccaagttacatcatacaaagtatgttaaagtatcccaagtatggcctggcgaggtggctcaagcctgtaatccccgtactttgggaggccgaggcgggcagatcacaaggtcagaagatcgagactatcctggctaacatggtgaaataccatctactaaaaatacaaaaaattagctgggcatggtggcatgtgcctgtagtcccagctacttgggaggctgaggcaggagaatcacttgaacccagtaggtggaggttgcagtgagcagagatcgtgccgttgcaccccagcctgggcaacagagtgagactccatctcaaaaaaaaaaaaaaagtatcccaagtatgagaaacatcagtataaatagtgagaaaacatatatacatatgttcttcttatatttacgggagagatatgtatgcttatctgtgcttttcatatatatatgaaacatatatgaaatatatatgaaacatatatgaaatatatatatgaatatgaaaagcaaggagtatgaaacttatatatgaaatatatatgtatgaatatgaaaagcagggaaaaggggacagtcatttagtgttgctgctgaaaatttcaatatgaaaaacgaggaatatatagctcaggtgcaacaggcacctttatatttataccattacaaaaacatggctctcctggtattttggttcttgaatttaggcttggagctgatattgaagagctgcttattgcagtgggttttcatgccaaacatagctgagtttgaatgacatttctgttactctggctacagaatcttgggcagtatcatttatctatccatctgggctttatttttcccatggggaaataggagggagaggggtcatggagtgaacagctttgcaggccatgccaactttggaattagtggagagaatataaggtaaataagaccatcctgtaatgacaacctagacttagacttgcacgaaatagagatgtaagtcaggatgagtctctcattcactcaacaaatatttattgaatgccaacccttctcagccgctgggtattcagtggtatagagtgtgaacaaaatgctgctggcatagagcttatattctagttgaaaggaggcaaacaataaataactgtgtaaattaatatatggttagtgacaggtgcaagtcagataattaaaacagagagtggtggggagctctagaaaggctcctatgaagaggtaagttgacatttaagctgagctcgcaatggcaaatcatgccaaggcagagagaaagaacattccaggaaaataccctaagaggagaggaccttggaatttttgaaagatgaacagatccctggaaaatagagagaggggcaccagagaggtctgagaattgggcaaaggccaggtcatacaggattttgttaaccacgataatgaatataagttttatatgaattacggatgcagagatttgcatttcacaaagatgactgcttgccacgtgaaacatagaccagtggggcccaggagaagaaggcaggagagcagttaggaagctgtctgggagtccaggcaaggggtcatagtggtttgaactggaaggtggttctgaaatggaaggtgaaggaaatggaagtaccgttgtagaaaattaacaggcagatctgggaaaacccagtggaggtgaagggagtgaattaaaatgattccaggatggagaggtcggggcttgggtgaatggtgccatggaaagtaatggaggtatctcaaatagaaagtagtgagtgggaagagcaggagtgagcttgcagaagttctagcagaaatgtgaaaggccatggttatttgccaagatggaagatagattaggtggtggtcatctcatttgggcgttgaaacttgttttcaaaacctgtacctggttttgatttctacacagggatgcaactggcagatgacatctcaagaggtgggtttgtcatggtggttattattgtacatgtgagacttttagcttttaaggtttttggtttttttcgagatagagtctcgctgtgtcacccaggctggagtgcagtggtgcgacctcggctcactgcaacctccgcctcctgggttcaagcagtttttctgcttcagcctctgagtaggtgggattacaggcacatgccaccatgcccagttacttatttatttatttatttatttatttatttatttatttattttttatttttagtagagacggagtttcaccatgttggccaggctggtctcgaactcctgacctcgtgaaccacacggctcagcctcccaaagtgctgggattgcaggtgtgagccaccatgcccagccagcttttaaggttttgccacacgctaaacaaggcatggtgaggactcttgggtttgagatcccaacagcctcagagatatcagatgtagggcaaagcgggtatctgcatcccccaagttctttccttctcactaaagtgcttgaagtactggtcctttatgatactttcagttctggagtacatgtgcagaatgtgcaggtttgttacatagctatacatgtgccatggtggttgctgcacccatcaccccgtcatctacattagatatttctcctaaagctataccccccagcccccaccccccaacaggccccagtgtgtgatgttcccctccctgtgtccatgtattctcattgttcacctcccacttatgagaacatgtggcgtttgattttctgttcttgtgttagtttgatgagaatgatggtttccaccttcatccatgtccctgcaaaggacatgatctcatgtttttttatggctgcatagtattccatggtgtatatgtgccacattttctttattcagtctttatcattgatgggcatttgggttggttccaagtcttttttattgtgaacagtgccacagtaatcatacgtgtgcatgtatctttatagtagcatgatttataatcctttgggtatatatccagtaatgggattgctgggtctaatggtatttctagttctatatccttgaggaatcgccacactgtcttccacaatggttgaactaatttacactcctaccaacagtgtaaaagtgttcctatttctccacatcctctccagcatctgttgttttctgactttttaatgatctccattctgactgccatgagatgttatctcattgtggttttgatttgcatttctctaatgaccagtgataaagagcatttattcatatgtttgttggctgcataaatgtcttctcttgagaagtgtctgttcatatcctttgcccactttttgatggggttgtttttttcttgtaaatttgtttaatgtatttgtagattctggatattagccctttgtcagatgaatagatggtaaaaattttgtcccattctgtaggttgctgaaacaggcagttttttgagtgcttgccacacaccaaccattgtgcaaagtacctaccatgcattatcttgctaaattagtataggattagtaataaattctatgagctatgttctatttttatcctcattttatagataagaaaactgagacccaggtatttgattaatttcacacagctgataaagagaggatgtggattctctaagtccagaattgaggccgtcagtcactggatcgtactgacatgatattcattcatatacccctgtcttccaaatgcatagatgtacaatagctgtcaggattgtatctccctgggtctcgtttcttatcaaaattgcacatttgctggcaagaagagagtggcacattgatctcaaactgtgaaataaatccatacgccttcagagaggttcttcgaatgtatggtcaagcattgcaaaagccgctgtgtgtttggaagaaaggtgaaactggaaggtctttggctcagggtgccattaggagtggtgtcggtggcagctgtgggccatcatggtacacatcctgcgtcaactccaggcctccccacaatcccatgaacagcaaagcccctcatcttttgaatgctggagaaagctccgtacgtgtagggcttcgccatcagtttaaaacgtctctggaattctttgattattttaatgtgctaatttcttgagctttgtttttgtgctgtctttgattttccactttcgcctttattttacgccattgttggaagggtcaaagcatcccagagcttaatggctctcttgttcagctattgtggggggaaaaagagcaaagcaaacaaaacaaaacaaaatatccttttttttgttttgctttttttttaatttaaaggcatccaaaaaattgtttcttttgcctttgatcaagatcatataaacataatcagtgtttattgtgtttgcataatcgaaaatagcaggaaactgatctcagattgcatggagctagaaaagattaagcctttccttcttggcagagttctacagacacacaaggttggtgtgatggatgcagcactcggtatccatgatgtgttcgggaaaatcctcagaagaaacttgcattgctttctggggaaattcctgaatacaagtggcaatgagatgcatgaaaattattttcagctgatgaatactgtctgaacataactattgctggggtgtataatttaaaatctgtagagtgaagtgtgcaatatatgggctttgggatacaacaaatatggatttaaattctactcctcctttttatcatctctctgcccgggataacttgtttcatccccttccctgagcttaagccccctcaactgtaaaagaaagataacaacccttacctcatatggttctagggaggacaacatgagataatacacatccaggcagtccccaacttaaaagtggtttcacttactttttttttttttttttttttttttgacattatgaatgacgtgaaacctttctgttttttcacatttggtatggtattcaatgaattccacgagatattcaatactattataaaattagctttgtgttagatgagtttgtccaaatgtaggctaatataagtgttttgagcttctttaaggtagagaagacaaagctatgatgttcagtaggttaggtgtatggaatgcaattttgatagaatattttcaactcacgatgagtttatagggacataaccatatcataagtcaaggaaagcatgtacgcagagcttaatagagtgcctaatacagagtaagtgcttaaaacatttttttaaagtgtgatacaagttctttggagagcctgaatgaattgggggtatggccatatgtaatatgttcagtgcagcaccattctttaataaattacaagttggtctatttctttgttcctttttatttttatttttatttttggaggcagagtctcactgtgtcacccaggctggaatgcagtggtgtgatcacagctcatggcagctttgatctctccaggcttagatgatcctgtacctcagcctcctgaatagctggcagcacaggtgtgtgtcaccacgcccagctaattttagtatttttggtagagacgaggtcttgccatgtagcccaggctggtcttaaacccctgggctcaggtagtcctcccacctcagcctcccaaagcacttggattacaggcatgagccacagtgcccagccagatgtaactatttaatgaaatgttgattggggtgtgcttgcttcccctgaagcctgattcttgatctttgttctggactccaggaccaaagatatcattgcttaatcttgcgaacaactctggaagatccttacagaatgacttgctttagccaaatcctatggtaaggcaaaacactacctaaaaacaataataagcataattgtcatccagatatgttgggaccctacagagaaattcagaagacaatctggctggagtttacagtatgtacaacagcagtcttggttaggccatggtattataattcagcaacaacaccaataataatattggtggttaaaatttcttgagtatatagaatgttccttctagtatgcttaaggcttgatatgcatacaatctttatggcaccctgcaaaatccatgagtccactgctgttttccaaataagaagatgggggttgtagtagtccattctcatactgttataaagagatacctgagtctgggtaatttataaaggaaagaggtttaattggctcacagttctgtgggttgtacaggctctgcttctggggaggcctcaggaaacttataatcatggcagaaggtgaaaacgaagcaagcacatcctcacatggccagcaggagagaggaagacagaaaaacagagcgagaagggagaggggctacatactttcaaacaaacagctcttgtgaaaactctatcaaaagaacagcaagggggatgtttgctcccattattctgtcatctcgcaccagacccctcctccaacactgagaactacagctggacatgagatttggggagggacacacagccaaaccatatcaggggtctagaaaggtaaaccaattttcccataacaatagagagaatacattataataagtaggacttgatccaaatctgagagacacccaaactcatgttcttaactatgagatttcgatacttggagtcagaagacttgggtttaagtttcagttgcagggaccttactcacatcttctaacctctcaaagccttgccatatcatctgttcaaaagaataccttcttcacaaaattgtaaagactgaatgagaaaatgcacctaaagcatctttgcacatcgcagagattatgcaagtataaggtgctatatttcgcattaacacctgagcatagatcattttcggattgtgtgagggatggtgaatttataaatttggtgatttttgatgaaaagaatcaatatgctgtctctttacagaggaattagtggttataagaactgacaatgcatttagagatttgtttttttcaataggacagaaagagactattttctttccatttataagaatatgaatgtgcttaagggaggacagattccaacaatcgagttgtttgctgtgatttgtacgccctggggatatggagagttgggaatgtagaaaaattacaattatggaataaaaaaagatccagggagaaggattttttttactgcctgttttgcttgtgtggcttggaacagggagtttcctggagggtgtggggtcttccttgctgaccctcgtgctttttggaggctcattggtaagccttgttgtgcctgttccttctgctcctagtccttaagaacatagctcttatccttaactgaccttttgcactgaatatgtgacagttaatccactggaaggttttagataggcagcatgtccagacactgccccctgcacgtgactggccccacctccgtcccaccttggtgttaatcccatggggtggattttctaggccagtctctttttagaatagcatttgctgatgtccctctaagagagtttttgggcatgtgccctggtttgtaaaagaagggccctcatggaggtagaggaaagaagtttcgcgtcccaagatctccaaggataccaattataggggtagctgggtacctgcctccctctgctcttcgtttctcaccgcaagagctctgctatgattttctccacatctggacttctttcctccctttcttgcatagctaacacccatgtgtgcttttggaccagtttccttgtcccgttcacaaaattaaaacttccttgacctcactgacttggttaagtacctttactgtatcactttataacttcagtaccttcatttgtagcttgcatcatcatttcagttttacaactttttatgtaatgatttggtttatgatactcttcccccaaaagactgtaaaggccatgcagatgaggaccaaatgtgttttttcttcctacgcatcctcagcatatgtgccttttatacagtaggcttttaacagtgactaaaaggaagagtgagtcggtggatggatggagaaatgaatgaatgaatgaatgggttacacaaccagcctgtccagacactgattcttttacgtaggctgagattcctgaggtaagggacaaggatatcaacttgcgttagtttaccttatgcactccatcgcagcctaaactgtcactgattacttgctgcccttagaatacaagctctctctgtcttccttcccctcctgccttttgcaatctcatttcatgctttgctcatttgccaccacaatacttaagccaggccagaattattttcagtgtttgaaagttgcacacccacttctcccttgcagattctgtacacgcttttcctccatcaaaaatgttttattctgcctcttcaaacattgcattttcataatcattttcagacctctgcctacatgtccctttttcatggaagccctccctccctgaatcctctaggttggacaactttcccctgtagtccccttgtatagcaccttgcatttccctccagatcacgtcccaaaattataatgaatatatgtttgcatttggacaatggcctgtttcctccactcaggagtaatagctacttgaggaaatgccttggtcatcaaaaagtgtctggctcctagtaggtactccacaagcagttatcaaataaaattgtaaaacccaggcactctttatggtcctaccaaaaccagtgacttgaatgggagatatttagggtcaaggaagaaagaaggcaggcatgttcatatttatttacctcctgtgggtttgtgatggcccctccttcttcttgggctagagtcagagccactttctcctaatcccctataggttaagctgagtaggtgataaagcccaagtcatagtagcataagcacaaggaattctgattatgttaagaaactgaaaacttcaggagtggttttggctattggtcattgctgaatctaagggtttgcataattactgtagggatgtcctcagtccgtggattgttttgactctctttggtgtcttggttttttgttgttttggtttggtttggtttgtttgtttgtttgtttgtttgtttgtttgttttgagacagagtcttgctgtgtcccccaagctggagtgcagtggcatgatctcggctcactgcaacctccgcctcccaggttccagtgattttcctgcttcagcctcccgtatagctgggactacaggcccatgccaccacacctggctaatttttgcatttctagtagagacagggtttcaccatgttggccaggctggtctggaactcctgacctcaggtgatctgcctgcctcagcctcctaaagtggtgggattacaggtgtgagccaccgcaccccacctggtgtcttgatttttattgctccttgcatatagtcaatggttctgagatctgacaggaaatgcctgatggaagagctatggcccatgcaggatctcacttcagaccttaatccttaagtttgtgtctgggaagatggggtacttgattggcaagatgctcgtcacttcttgctcacctctggatgtcaatccacaagttttctttggtatcttcactgtatgaaaaacccaactataatattacactcaagtacacacttataggagcacactttttatatagtttctatataattttcctaccccatctgtcttaggtcagatttcctagggataatgccatgcctgagatgggtgcaagtggtgaattgaaggaatgctctctggacaatgctatagggggtggtggtaatgaatcaggataaggcagaggaaggtatggtttcagggggaaacatagcctcagcctgatcttgtaagaagatctggattattcattgtgccaaggattatttcactgagtcttatccccaccccgtttcatccatctgtctttggccacaaggtgtcccccaggaaggggtggtagccgccttaccccttacctccacctttactccaggcatctctggctaaggtgaatcatgccagccaagtccaaacattcagagaagaattcaggttgtcagcagttagctgcaaacacccacgtcagcaggaagatggttcatcaagctagggaggatggctgaggcaccagctttaaggagtcatagaatggcctggtgtggtggctcacacctgtaatcctagccctttgggagtccaaggtgggcagatcacctgaggtcaggagttggagaccatcctggccacaatggtgaaaccccatctctacgaaaaataccaaaattagccgggtgtcctggtgcgtgcctgtaatcctagctactctggaggctgaggcaggagaattgcttgaacccaggaggcagaggttgtagtgagccaagatcgtgctactgcactctagcctgggcaacagagcaagactccgcatcaaaaaaaaaaaaaaaaaaaaaaaaaaaaagagagaaagaaataaaaaatagtcatagaatgagaaaaaaatctgaaattagagggattgctgtataaataatgacctctgcttgtattttctgagtagttccaattttacccagtcccttctgtctccttagtcttcagcctgaatctcttgcttacctcccctaatggccatatggggaacaggattttattaaggaaacctcgaaagggttgacacaagagtcaaacccccacacctttagatgcataggcagtgaaaccaacctgtacttcccatcttcttgcgtttccatttatccattcctcttggggtccagggtcatagcctctctactgtacctccaacgggtgccactacagtgtctggattctcgatcaccacctcccttttcagtttactgatcaggcagtttcggagaccacgccagggtttcatgtgccccggttgaggcatgaataacagcagtttgaattctcctttgtaattctcatccaggcaagtcactcttttttcctggtataaatgatcagatcgctgctgcagactcatccaggattcctctgccttattgtttttcaatccgtctacttccacgatcctctcttcccaccctccttgccgtcccctgcagccttcatgtctgtgcatacataaataaggctgttatgcacgcatgtgagaatatatacccatcatggtactgtgtgagcctgtgtacgtgctgaggaaatgtaatgggctgtggttgtgtgtttgtaggtgtataataagtttgccgcagactagggggataaatagagccatttgttgattcaaaccaatttttttttctcttgagttagtatccaatctgtagctaagaactgctgactacagcatatttccaagtgtggattttttttttttttccctgacagccaagacctaactcttgcctgatctatgtagatgcattgttcaaattacaaagcttaggtgacagaattgctctttttactgggagcccccaacacacctgtcatcagatagaagggagaatgcagaagtcatcactttacttagaaactcagcagatgattgaaattatttcttactactaattccccttttagtggagataagccgctttgttcagctgtaaatgaaacattagggtattaactgtggagccagaagtattggggaagctaagattttatctgcagtaagaacattttgggcaataaattgttttgttggacggaatactaaatctcttgagttacaaagaagcagagctcattaaggggaatgcttaaagcagaaaacaaggcgagacaaaagcttattacctttgttgtggggattgagggggtgtttgcaggttctcatgtatatgtagcatggaagacttatgcagtacagttattaaatagatgtgtctatagacttgcaaatgctctatgaatatgtccaagggacaaatacatttctgaaatatcaatagcaatctgcaataagttatgaattttggcgtacatatttaccctcaaagactagatttttgtttcctgcgggtgaaattttcccgtctctttgccacatccttcagattaattgactggcatggttacataaatgtttgtaatagagaagagtaagtgccagggttatccaaaatattgtcgcaaaatacacacctaaattaagataattatgtgttgggagcatctatcggcagggcttggcaaggaggggagctttctcttgatggagaggaggctctttctgggacactgaattcatgaatggtgggttctggattccccagggtgctctcagcttgtaagtgtcaggggaggggattgagggctgttcttttgccaataaccagggcggaaggaggacgagaggaagaagacagtgccttcttttccctggagttagcaaccctctgctgtgtctccaagagcaaggctgtggcagtacaactgtctacctgtctacaccggctgctccttcttgcctttggacagaagatgacactcacaaactgtggcccctgagcaacagtgtaaacgggcatacctcagttacaagcggattcaaatgtaatgagaacaatttcagagctatgcattttattcttctgtttttctccctggatgactcagggcatcttttcacagactcccaccctgaaggtttttattgccatttctgcgcttccctacacgtcctgattcataagtggatgctcaggacacagtcactcagagtagcttaatactctgcggacctcacgtgctgagttctcattctggacttaacgttactttaagctcagtttgtacctttccttggttctgtcaatggaaataaggacaacacttctcaaaacacagcaggtgggctgagagtggtgacttacacctgtaatcccagcactttgggaggctgaggtgggtggatcacttgaggtcagaagttcaagaacagccttgccaacactatgaaactgcatctctactaaaaatacaatcaattagccaggtttggtggtgtgctcctgtaatcccagctactctggaggctgaggcatgggaatcacttaaacccaggagacagaggttgcagtgagcctagaagatgccactgcactccggcctgggctatagggtgagactgtcaaaaagaaaaataaaagaaaaaaagaaacatagcaggaaggtagcagtggacaaatgaagtattggaaacacatagcctacacattcatgtgagctttaggagaacgtgaggtctaacttgcttaaagaaaacttagcacatgaaaaatgaaaactatttttttcagtgcatgagtgatcatgatctctttaattaaaagtgcactgaattgtaagatcttttaccaaaatgttaccatctttatcttctatctctggtgctgagtgtagtaacaggaagagatttcgaagtgaagactttagtaagatagaattgtgtgtattgtgtttaaatctggggtgtatttaaaatgtaattgaaatcacaagatatttaacatgctattcactttgcaagtgacttttcaggaccacttatctgcagactgtaggacaccagtctatgaacgttggcttataggagcaccaggtctccagttgagttaattcctcatacttgtcacatagggggcatactaagtcttcctgagatgagtagaaacatagatccacataaaaatgaaaagaacccactggtgacagagggtctcagagcctccagtttttttctgaactttgaaagtcagtaccaaagagtcagaactgaatggaaggacactaaaatcaatacttttcaatgtaacatcacaagcgttgggactctgaagaacttgatgacacatgattcagaagcaaagtgatatttacataggaagactgtcctcgccctctggaatgattttgacatgtgtattcactcttagttttggctcttagagtttaagtaatagatttacggtggtatgaacacaggtgttaaagagttctgggttcaagtcttgtccacgtcccaagctgtggaactctgaataaacctcttagtctattggaaccttagttttctcatctgtaaaacagatgaaactacctgattttttaggccctacttggctcttaaatttctcggctcagtgaacaatgcaagctttatgttataaaccaccaagacatctaagcttcttcccttacggccgttagtggattaagcgatatcctcagagcaactgtttggtgatttaacctcccccagttgctctatttcctgggttgttcatgagtaattgataaagaatttgcaacactaggattccacatggaagaaggaaatgcctcttttggacccatttcaaacaagcattggtaggagatgcctcagacgcttatgcttaaagcatcagtatcattgcctgacagcttatcacagtggcaggagcatagggttgaatcttatgtttttctttccctctgggtgacacttacaggatgcttaagtttgctggacctcactttcttcatctgtaagatggggacagagaactatctcagtgttacagaaaatttgaagatgaggctgaagatgtaagattttgttaatgtctacagtgttaaagaatctcaatatatggtggctatgattattgctattcttatattaacttggtgataggcatcagtggttgaattatctggagaacccagaaaacagaacagatcttgcaaattcagtcgcttacccagatgttagttgtttgatccccagtgtgacaaatgccaccttcaatctctctaacatttctaggcaagaaattattctctcaggagactgccagagaggcaattttgagcttgaaacttattgatgtgatgggctatgaccaggcaacttccgtagtcggggcatgtgctgagtctgactacagtctgactacaaatcccagctctagccccatgtggctgggggccagctattttcattgtggggttagactccctggagggaataattctgagatgacccttttaaaatgtaatccttgtactaaagtggggctagagggttccctattcattcatacggctactgtaacaaatgcccacaaacttggtagctttataacaatagaaatttactctcttccaattgggaggcaaaaagtttgatgtcaaggtgtcaacggaaatagtagacactaggaactacttggggcaagtgttgagtgactgttgggtactctgctcactttgtacctcaaacctcagcatcacgtaatatactcatgtaacaaagctgcacttgtacccccgaatccaacatgaaagttgaaattatatttttaaaaagcaatgtcgggccaggtgcggtagctcacgcctgttatcccaacattttgggaggccgaagcaggtggattacctgaggtcagtagtttgagaccagcttgaccaacacggagaaaccccatctctactaaaaatacaaaattagccaagtgcgatggcgcatgcctgtaatcgcagctacgtgggaggctgaagcaggagaattgctttaacctgggaggcagaggttgcagtgagccgggatcagactgttgcactccagcctgggtaacaagagcagaactctgtctcaaataaataaataaatgaataaataaataaaaataaaaatgcaatgtcagcagattggctccttatggagactttggatactttgagggaaaatccataccctggctctcttttagcctctggtggtgtctgtcaatacctgacatttctgggcttgtagatgcatctcgtccatttctgcctccatcttcatatggcattcccctctatgtcttctgttctgtgtgtcttctaagaatttgtcgatggatttagggctcacttaagtttaagatgaccccatatcaagatcttttaacttgattacatctgcaaagaccctcttcccaaataaggtcatagtcacaggcacgaggggttaagacttagacatacctgttgtggggacaaaattcaatctactgccattttattgtgaactatccttgcatggagaaacagttcattttaacttagaatattcaacaacacaaagctaacacttttctgtgggcgatgactatgtaccaggcattgtgctaattgataaagggcattatattttaaagttttatcttaacaattatatgaggtagggattatggccttctctgatttattgatgagaaaattgaccctcaggaggggaagaccatttttcttagtcacccaactaagaaagtggcacagttggtatcctaatccggaattttctgattctgccatttatgctttgaacaattatgctagaagttctcaaattttgtcatgcataagaatctcctggggttgttaaaattgcaccttccccaaagctcccatctctacagagattccgattctgtaggtagaggggaggggcaaggataggcattaaaaataactgcattatgcaattctgccccctctctcctcccactgaacccatctttaaggaaactgcaacctcagcacaggggctagcagacatattcagatcatctctgaagacagaaatcctcaaaagtgaaaaaacacaagaaagtccaggttgcttttttttaatttaaatttatagtgaaagctaccttggcccacagctttctccctcctggtcccttacaaatatattcctttccggattcttcaagaacacagtttgtattaccatctcccagcaagaagaaatttggaaataggtggtattgctcctaaccccttcctaaatttgagtctgctcattcttcagccatttggaggttttccacttggatgatgtccacagagctaggggaggaaaaattcttctgcaaagcacagtggatgaaccatcagtctgcagtaatccagtcaattaaaaatggatttcagttcccagcagcatggtggtgatgttaggaggagtcagtgtccacaatgctgttggtgcgcttgcccattaagtgatatttaggggatcttctgccatagcagaaaacagtgcggttgatgatctttgcaactaaagaagcaaaattgaagtctcacataccaccacggtattttatttctaatatgttaccctgccaaccttggaaccccgcatgaaactcaggaatgtgaagggacagaagtatgatatattgcccgatgcagctgattcgagagggggtatccaaaatacagtcccaagacatccaggagaatttgcctgaagagagggaacatgtaatggtattagaaaatccagaagatctaagctgcctgatgaagctattttttaaaaaatgtatcttcattgcatttatttttcatcacacagtagttggcgtaaaaccattctctctgtgaaagaagtcaaactacaaataactatgcaaaaatatatagagaaaaaggtgaagcttttcatattttaaatagcatctgaattacattgcttctttcaaggaggtaaactttgttgagtatttagcagttgttccagacttttctctgataaactttcaacttcaacataaaataatgataggtgttttgggaagccatagatgggatggctgtatggatcgatagctagatggctaaatatgttgatagaccctcaaacagattaggtaggtaaaaaatagaaaaataaaaagatagaaaaatagttaacaatgcaagcctctgggcagaagaaatttttccctatgttgtttatgctctgtgtgattctggcaataggtaaatgcattgattagcttctttgaacccacttttcattatctatcaagtagaggaaaacagtgtctttgttgcttgcctccagaattgaggatgacagtgaggtaatgaggaaatgtatttgaaaatattatggactcaacagacatattggcacaactcaggagatgtcataggcccagcttctataagatgatataacctagcacaggaggccaaaagagtttccaaattgcataaaggaaacttgattgtcctttaaaaatggctctggagaaattttatacccaggctcatgtcatctctcagtgaggttaaatctccaaaagaggaatgtcatctgttaataatacatcaagcatgcagcaggtagatgttcttttccttccctttaaaaagttatttttattttattttcatttttaatgtatattttaatgatgcagagtgtcatgttcctcagagtcagactgtatcctaaagtaatggtttggttaaaatatagaatggatttttgccaaattgaaaaatatatatattgtgttataaaactcgagctgtgatgagcaactctttgaaaatacatttaagtactcactgagtcttgtctgaagactcacctgtaagggagggtcaactaagttattcagtcccggacgttgttaactgccctgaaagtggtggctaataatttccttttgaagtgaaaagtagtaagtatgttcctgaactccattatcaatctttaataatttcagattaaggcattgtacttctatacaaaggaatatcatctttgaaaagtggtcttaaataaaatttcacaaataatagtatcccatcctcttgcatttgagaatttctgccgagagataggagaaaataaagactccttgctgctgtcaggaggtcatcgttgggaacagacttcaaagtatgtgaactttggtagtggaaagatgattattccttggtttccagatccttatgcataatttgaatatgagtggctttcaatgctaagtatatgagactcccctctgttaattatgctgtttcagatgagcctaattggacagccactggcacctaatatggtaaatatttcatataacgtgactttgagaagaagggtgcccccctccttaatcccatttgataggatggtgtaacctcaacagcagggatagcttaactctagaaagagttgttatttatctgagggcacctgtaagggggacatcacctaactcattcagtcctagacattgatgcctaaagtataaactgtggtctatagatgtaggaaggcttggaggcaattctagaaacactgcagaaaatttgcagtttctcctccaatctgatcttgaaggaggaggtgaacctggaactccccgttcacgatgcagttgtggaataaaatgaggcttgatttctcctggattatctgaccacttctttttattttcccccggctctatgggggtacaattaacaaatataaattatgtacatttaaggtataccatttgatattttgatatatgtatacattatgcagtgaccaccactctgaatccagtgaaggtatctatcagctcagagttccgttttttggtgagatcacttagaatctagtctctcagcaaacttcaagtatacaatacagtatcattaattgtagtcaccgtgctatacattagacgtctagaattcagtcatcttggataactgaaattttgtattctttgactaacatctccccattccctgctcccttcagcctctggcaaccactcttctcctgtctgtctattcctacgaatttgagtgttttagatcctgcatgtaagtgagatcttacagcgtttgtctttctgtgtctggtttattttctctagcataatgtcctccaggttcacccatattattgcaaatgagagaatccccccccccccactttttttttgcccagtctggagtgcaatggcacaatctcaggtcagggcaacctccgcctcccaagttcaagtgattctcctgcctcagcctcctgaatagctgggattacaggcacctgccactactccatgtgaattttgtatttttagtagagacagggtttcaccatgttggccaggttggtctcgaactcctgacctcaggtgaaccacacacctcagcctcccaaagtgctgggattataggcgtgagccaccatgccggggctccttgttttcttaatagatgaataatattctagtacgtacataaattttaattaaatattattcttttatatatatatataacctttttaattcattcatttgttaatgggtgcttaagttgtttttattattgtgaatatgccgcagtgaacatgggagtgcatatcctgatttcatttccttttattttattttattttattttattttattttattttattgagacggagtctcactctgtcacccaggctagagtgcagtgactcattctcggctcactgctacctccacctcccaggttcaagcgattctcctgcctcagcctcctgagtagctgtgattacacgtgtgagaccccatacttggctaagttttgtatttttagtacagacggggtttcaccatgttagtcaggctggtctctaactcctgacctcaggtgatctgcctgcctcagcctcccaaagtgctgggattccaggcataagccaccgtgcccagccgacataggaatttatttagtgtcaccttgtaggtcactgacctatcagggacaggcctccaagcttctgacatccagtgatagcttcttagaggtgaatgatgacggctcctgttaacattttctggcaggcactgcgtgaagcacttggcataaatgacctccatagataggtgctattatcatttctgcttcacagttcaaaaagtaaaggcttaaagaatgtaaataatttacacctgagtgaccagtacctacacctcagaagagaccctgtctctcagtcatgctgtgctgccagcgttggaaataggtagcaagtctgtggatattaaaagaatgctttttcagaaaaaacaaacaaacaaacaaacaaaaccgaatgcactttttaattatctgattccttgttgtcacgtctttatcaggtagaatgcacaataggttatcattcccttttcactgacgcagaaacagatgtgggctctcctggaatgtgttatgaattgggtgaggggtgccgttcaggatggcgttcctgggtcaatggattttatttccagtgagtagatatgtgggcgtaggtcctcgtttctcatgtctactccctctagtagagatgattttactccacagcaggaaagatgcctgctacaccacaaagggtattatttcggttacggtaataacgcataagggtgtgttttcaaagctgggcagtgcatgcttgccaggttgcagggtgattcttgagagctttctgggcccatcctagagaaaaatctccagtgaggctgcagttgcaatttatttcctcattctagcaagaaagctcttgacgatacagcagtgtttgttttctgcttggtaaagtagaaaggaaaacagcagaaattagcacggcgcagcgctgatgccagcccagaggcagggcctctcctggtagcccccccgctgcaaacctttgccgctggaaagccttcagctgcgatgagattagcagatgcagcagttcactccaaggcgctgtgcagttttttccctgttccaccaggtgttgccagagaacattgagcggagctgagctccgggcgaagtgtgttcccagctgctctggaacactcgggctgttctgaaggcagcaattaaatgagttatgctgaccggagcaaccctcttccttgcacgtttaaatatgcctcccgtgtgcgcctcatgcctcacatttcaaataaacacatttttgatgtgcctttggatctgctcacacattgttatattggaggaatcagagcaagcaaggctgtgcggatccaggctgcaactcaggtcccagctgcacctgtggtcagccttccctgttaccagaaagtggacagtaagcttggatgacacagagggggttctcagtgctagggtttttgcctggtaagtaaaggtagttccttctaacacctgtttcctttccactcttccatacctggagcattgagatcacagtcctaggtctgtgattctcaggcagttgtggctctgtgtccccagggtgcatttggccatgtccagagacatttttagttgtcacgactgggcagttgagggatgcaactgacatcgagtaggtagagcctgagatgctgcaattgatcctgcaacacacagagcatatcccccacaacaaagaattacctggtttgaaatattggcaatagtgaagggaaggggagaaaccccattctggaggtgaaggctttcttggcaagatacccgcattgcccaaaacacagagtacaatctttgaaactgtggtttttccagaaaacctcatctagatcatgacacctaaacatcatgcctcaccaaggtaacatccccaccaaggattaaagaagagttgccatatgccatgggcctactatgtgccaaataccttgttcatacggtttctaatccttacagaaataatgttgagtgggattactgcactgcgttatagaagagtaaaccgaggcccagagctcttgctttccttgttcagaatacctggctactacgtatgggagccttgttttcatccagtcccttccttttactgtgtcaccctgtggcccagagggtggatggatgtgggtttccaaaagaaaacctactttcgaatcttgcttttgagtggacagtaaattagagagtgatgcaaaaacatttagaaggaaaaacaattaaaaaatacaaactttccggaatccagtgttggcctgcctctaaaactctctgccttccaaagtgaccacgcacccacatggcagattgttacctgacaccttctgagtcccttttcagttactgctttggcaaattactacaaattccgtggcttacaacatcacagagtgactctcttagcgttccagaggcaaaaagactgaagtaggtcttactgtactaaacttgaggcttctgcagggctgtttcttctggaaatctaggggaaagtccatttccttgcattttctagtttctagaggccacctgctttccttggctcatggccccttcctccgtctccaatgctatcagtgtagcattttcaaatctctctctgtctctgcctctgcgtttgtatgtcctgtgatctcttaaggacccaagtgagtatgctgactaaccctaagataatcaaagataatctccccatctcgagaccctgatcttaatgttttttattttcataggtttttgggggaacgggtggtatttggttacatgagtcacctttagtggtgatttgtgcgattttggtgtgcccatcaccagagcagtatacactgaatctgatttgtagtctttgaatcacatccataaactccctcttgccaggtaaagtgaggattaggacatgagcatgtttgggagaaggatgttactctggctaccacaggtagtttagagctgccactgctagggataatgggaataaagtaaaggaaaagcatagaattttgacttcaagggatttgtatgggtgtgtgtgtgtgtgtgtgtgtgtgtgtgtgtatgtgtgtggtgcagagaagaatggcacacagcaaaaagaagccatgatactaattattctcagacaggtatgattatcatcaatcatatgcatctttgtatccccagaggctgctatgttgcctggtaagtggggtggtaggggcacagtttgtatttcctgtgttagtttttgtagggaaggtaagagcagtgttcaatagaaatacagaagaaagactgcttattatagcaaccaaaatatggcagcatacctattatcttaattgccgttaacattcaccttaatacaatgctggttgatatgcagaataataacctagagactgtgcaagtcttcacagtgccttctgtatcttcatagattcagtctattccattacactctggtgttgtacaggttttcatatttcactgggggtgggaaaactatggccctgggacctaatctggcctgcggactattttcctagacagaacattatgggaacacagccatgcccatttgtttaccaatcgtgggtggctgcttttgggccgcaatggcagaattgaataatcacaatgaatgtatggcccacagtgcctaaaatatttattccgtggctctttacagaaaaaaagaaactgataacccttgctttacacaactggatgctggcaagctcccttagggaggacagaaaggttgattaaccagaacacaacactctcacaacatgggggtcagaacatacacattctttgaattacagtatttgtgacaacctcctattgaacgtcttactgcaaataataaaagtctcaagttaagggagactgacactcaaatcatttagatttttttttctcagctatgtttagtgagataaattgtgcttcactgcagtgacttgtagatgacaatacagcagaagaacttttaatacggcgactgtattcattttgaaattttaaaaaatgttagactgtgtctgagcacagtaaaccattcaaaactgtcactgcacagagatgaatgggagaaacagtgcatctctgaaaatattccgtaaatatccttaaattataacgtctgtttgatctgctgagaagtagctaattcccgacacttttcatctctctagactgcccatcgattgtcctgagtattgcgattgctgttcctgataactgacttgataatttaatttaataagaccttatcttggtctagaggagcaatcaaggctgctatctcctacagcacgtttctccaccattgacattttaggccgaacatgtacttttttgttataggtagacatcccatgcattgtaggatattgaacagcatccctggcctcctatccactttatgccagtagcatcccctccctccttgttgtgttgttactaccgaaaatgtctccagatactgccattgtccctaaggcatgggggcaggggggtggttaacatattccccagataagaaccattgttctagaggtatggtgttggaagcgcttggcacctttcatgtaaatcattgcatgttgtcatcccaggtgaacttttcttcttttctttttgcatccccgcccgtcaattcttcccctactttctcctgggctgggcttttcttcatgtctaaatgcactgcaaagacgagattgccttgaactcctccagcttttcccgataaccctgagctgcgctgtcgctctaagccagatcagcagaatccggcctgtgatcaggttccgggagctggaggacctctccgtctcaggctgctgtgatcagagagtctggagaatgagaatctctctgatgtggtcttatcaggctgagcctaatgtcaaccctgttagaggagctttgtccgatctgcctgtagctttgttctgaaccgttcagtaacagttcactggagcagaaagagccctgtgaattgatattataaacccacatgcctgttttattcattgtggaggcaacagaatataacacaagtatttatttttagtggttggagaatggcatttctttccccgtccccattgtcacagaatgcagaaaacagcacagggctcctgaacacaattctattagaaagctgttgccagttgttcctggtttcgattattttgcactatcctaagcagtgtatgtctgtgcattgaatatgtatgtgtgcgtaatacatattacgttcgtttggatggtcttaataaggagccacataccatcagatgtaatccaatcactataggccagaccttctatccttggctattcccttaaccccatcaccaccttgatttcgttggaagttagattttctagaaaaattcatgaaacttcaacatgcttcattcattccttgctctgggcattccttgctgaaggtcaggagctgtgaaatttctctttagtcccattgctttgatatggcagaggctgggcaatgaagaaattgaagtgtggaaaaatggagttccggcaatgtcttaaatgaggggaggggtcttatcgaggaggctgtgcctgtggtctgagctgacatttctctaacagtgagaccaggaagaggaccaggggacacagctggatggctgcaataccagggtcccttcagctgcaattaaagctgcatcttacattggagtcttcagtgatgatgatgatgatgatagtagtagattgaacataggaaattgctgtcatttgacaattgttaacctacataaatgtcactttcctacagcgcaacttaataattgtacacataatagctcatctgcgctgggtgaccgctatggtccaggcacagtgctgtaggcactgcatatgtgttggctccttagaccaacacagccactgtctattacagatactgttattgctctcacttgacaaataaggatgctgagctgtgggaataatttgcccaatgacactaaatggcaaaactgggattaaaacccaggaccttaagactgcagcctcggctgagcgtgatggctcacgcctgtaatcccagcactttgggaggccaaggtgggtggattacatgaggttgggagttcgagaccagcctgaccaacatggagaaacccggtctctactaaaaatacaaaattagctgggagtggtggtgcgtgcctgtaatcccagtaaggaggctgaggcagcagaatcacttgaacccagaaggcagaggttgcagtgagccaagattgtgccattgcactccagcctggacaacaagagcaaaactctatcccaaaaacaaaacaaaacaacaaaaaaacaaactgaggtctcttctgttaacccctatcctcctctcttggttggataacagttttagactgatgctcctaattcccacagaggggcctgcattttcatcaggcttgaggatcatgagttttcacgtgtgtgtgtgtgtgtgtgtgtgtgtgtgtgtgtgtgtaaatcaccctaattgtggggagtactaataagttccatcgatctactcttcacctagtaatcaacttgaattatttatttatttatttatttttcgagacagagtctcactctgtcacccaggttggagtacagtggtgtgatcttggctcactgcaccctctgcctcttgagtttaagcaattcttgtgcctcagcgtaccgagtagctgggactacaggcgtgagccaccatgcctgaccaatttttgtatttttagtagagacggggttttgtcatgttggccaggttggtcttgaactcttgacctcaggtgatctgcccttctcagcctcccaaagtgctgggattacagccaccacacctggccaatcaactttgaattctaagaatgggtgacaaagaactttgtcttgagggttgtgtgttaagcaagagccatcaggtctcatcctcctcagtttagccacaattccacattagtttccccgacagtgtatggaatttcagttctacactcttccttctctaaatttcacccggtctttcagagaggagacagggccctaacagacttagcaaagatgttgaacacatgaaaatgggaagtactgtttaaaaatggaataactcttttcttcccccaaatctataaccccagtctaattgtaagaaaaacatcagtcaacttccagttgagggacatcgtgcaaaatatctgactgtcaaggtgatcaaagacggggaatgtcaggccaggcgtggtggctcacacctgtaatcccagcactttgggtggccaaggtgggtggatcacctgaggttgggagtttgagaccagcctgaccaacatggagaaaccccgtctctattaaaatgcaaaaattagctgggcgtggtggcgcatgcctgtaattccagctacgtgggaggctgaggcaggagaatcacttgaacccaggaagcagtggttgtggtgagccaagatcatgccattgcattccagcctggacaacaagagcaaaactcctttcaaaaaaaaaaaaaaaaaaaaaagatagggaaaatctgagaaactatcacagacaagaagaaacttcagagtcacggccgcccagatgccatgtggtgtctcagatgggatcctggagccgaaaaaggacattagatgaaaactaaagcaatcgaagtataggctgtagttaatcgtgatgtattcatagtggttccttagttgtgaacatgtaccatgctactgtaagatgttaataatagtgaaaattggctggacaccgtcgctcacggctgtaatcccagtactttggaggactacctgaggagttccagactagcctggccaacatggtgaaaccccatctctactaaaaatacaaaaattagccaggcgtggtggcgtgtgcctgtaatctcagctcctcatgaggctgaggcaggagaatcacttgaacctaggagctagaggttgcagggagccgagatcgcaccagtgcactccaggctgggcaacagagtgacattctgccaaaaaaaaaaaaaaaagttaataataggggaaattgtggagtacatggaaattctctgtacaaacttcacaacatttctgtaaatcgaaaagtatgctgcaattaaaattttatttttaaaaagggaaaataaacataagcccacacaaaaaatatggactaatcaaatactttctagatttcgtgtttatagcgtttctcacttagtaatacaaagcattctatcttagatttctcccatgtctgttagactcccaaaggcttttaccccatggtaaacagcataaacaaatttgtatggcttttttaaattcagattttcccaggctgatttaatcatggaattacgactgggcatggtggctcacgcctgtgatcccagagctctgggaggccgaggcaggcggactgcgaggtcaggagatcgagaccatcctggctaacacggtgaaaccccgtctctactacaaatataaaaaattggccaggcgccatggtgggcgcctgcagtcccagctactcgggaggctgaggcaggagaatggcgtgaacccgggaggcggagcttgcagtgagccaagatcacgccactgcactccagcccgggcgaaagagcgagactccgtctcaaaacaaaataaaaataaataaaaataaaaataaaataaaaaataaaaaaataaattatggaattattttacttgagaagcagtgatggggaaaaaaaatgtaggtcacaagcctccctgatgacaattcctttcataacaccagcttttcccaggacacaccattgagacaccttgacatcactacccagaagcattggtaacctctttgtgcctcaacactgattctcgcctgtaaaccattcctctcccctggccaccctcctgcatctgaccccctgcctcccttccccagtcttcctctgtagcaatgggtcccacacatccctgaatcacttgttaaaacctagatgtccagccttgacccccagagttcctgattcactgggtctgggatggggcccagaaactttgcatttctcacaagatccaaggtgaggtcaacactaccagcctggggaccacactttgcaagccactgagatgccctctgtctccttgtaaggctgccatccattccgccatagattccacgctttgctgccacccccctgccccctgcctgcccctttgcttgtcctcttgctattcccaggcactggttgcctgttttctaacataaatgtcaaaaaagtattcctcagcgggtgtggcattcagaaatggataggattcaaacaagcaaagggggttacttggtttaagagctcagtttaatgacaagagtattttccttgtagctttgtagagctggatcccaggtacctctcatgaagcccatgaacttggtttctaccctataaattgaggttgatgagactcatcactttggcttttgcgaggattaattggatttgcattcgttaagtgcagagcctggcacattgtaacagctcattagtaattactttccaaactccaaggagatggttctcagatgttggtgactatcatcacctcctgcagagatgtggaggtgcagagtcctgaccctgcctccaaagactcttactcatcaaatttgggagtgagataagaatctgtacatgttacaaagaaaccagaaaatcccaattcaaggggtctacagacaatccattcattcgttcttcacttagttatccaacaagtgtttcacatacacttccatgcaccaagatgggattgcaggtggtagggatacagaaatggacaaaaccgagtgctcaccttggtggagatgattggcagcctgccttacacaaggaactctatgttcactggccaggttatgggaagtggtacaaagttggagtaaaagtaaggtaagaagatagattggtggtcaaaagtctttctgagaagattacatgagaggaaagatggaataaaggaagaaaaatattgaaaaatcttcaattaaaatgtgattctttctaatgtgagccacagaatttaacacagatctgtagtagtcatcttgagtgtttttcttttgatagaaaagtgtgactttccaaccaatatagtaggaacttgttgaaggtctaccatatcccaaacacaatgtttttcaaatattgtttttattttattttatttatttatttattttgagatcaaagctcactctgtcacccaggctggagtgtggtgatgcgatctcagttcactgcaacctccgcctcccgggttcaagcgattcttgtgcctcagcctccagagtagctgggattacaggcgtgtgccaccatgactggccaatttttgtatgtttagtagagatggggttttgccatgttagccaggctggtcttgaactcctgacctcaggtgatccgtttccttcagccttctaaaatgctgggattacaggtggtgagccacggcgcccagcccttatttctaatccctgtaacagattatgcaagggaaggtgtttcatcccaacattacagatgaggggagttgtgaggagcttatatgatcacatagtgaatggccaaagatggctctttctatactctacagcctctgacatacaaagattcagacttcatttccaaagtcattagcagtaccaactgtaatcctcttaaggaactaattattttgttaccattttctgtatttattatattgccatgccccatggcttacaatcctggctgtgccttcaaatgtcccagaggcaggaactgagtgtctggggtattaaggttttctcagatgatgcatctgatatgcatccaatgacaggtaccactggctagcattataatccaagataaatccatatcttctgcctgtggaaccagatggagttctggtatcaaaatacagatctagagggtagctctgagccagtgcacttgaagtttgtggtcatgatgaacttcaagctcatgtaagagattactgaatttcccagcaatgagtaacggaccaacctatggagaaggcagacagaatggcaatgtggaataagcacaggccctggcatccaaactgggtttgaaacccacctgtccacttttctggctttgtgatttggggtgacacacaaaatttataatatacgtaatattattaagaacacagtaggttcccagcattgtattctctgttctctctcttaaaagtgccaccctctaccaagaagcactagttgaattccaagaaggcaagaaaagggctaccatttcttctctacccagcaatggttacgttaattttccagtgcaggaaagtggaagaaaataagagtatatatatatctttccaggcccttctttccaaagttatttgactctaaacttagcatcctctcccgggaagatggaactgtcctttttgtgcatttgctgtgataactttgggcccagttacgcttgctacgaagcttgggctggtagtggtttaggagaaaaaaaaatcaagtgaaacttaggactgtcttctctcttctttcccgaacttcatctttgcagagatgatctcctctttgacatgcagagtactcaggcctctttttctcttcttgtcctttctttcttattaaacctccagccccccaatctgaaacgattgctcccattttgtattccatggagctgtaatatttgcccaatgatgagctccattcagcagtttgttaactgaaatgggaagtgacagattcaataaaaggaaatctctgtgccaaggaaacagatattatttctcccctcgctctccctttctgtgtctctcagactactctgtgcccggaatccagagactctgagcttacggacaagtcaaagctttctgttgatccatgcccaactaatttgatcagaatagaggtttttattccctgtagttcttctctctcatgcttactgatatgattgagtgcctgggagtcacccccaacctctgctgattgttagagggaggaagtgatgtacaggaaagtgggtacatggtgtgctgggaggggggccttgtagacaagatggggacaattgtaaacagaagatcggggctaatgtaaaagtgcaagatcctcttctggggacagccttcttgtcttcatggatagtgcatatagaaaagcacccacgattcccagtcattgaaaaccagaggaccccagtggcaatggatacccatttaatctctgagaaaatattaatgagtaaaaggcaagcgactttagggatgtttttttttctttccacatatatgtggacactagttgtgaataataatgacaatgacgatagtgagtagatatcatgtatcaactccctactaaatgccaaggtttggtctatgcacgtaacacatattatctcattcaatccccgacaacaaccctctgaaggaggtgtccttattatccacattttatagcagaaaactggggcttagagaagtaatgtgtccaagaactcatagctggcaggtaggagccctgagattccagtgtggggctcgtaaacttacactttgcctaaattttttttaaatgattgagttcattgttcatttatatttaattttaagaaatagcacaaagagtccgggcatggtggctcacacctgtaatcccagcactttgggaggcggaggcgggtggatcatctgaggtcaggagtttgagaccatcctggccaacatggtgaaaccccatctctactaaaaatacaaaaaatactggctgggcgtggtggtgtgtgcctgtaaccacagctacttaggaaactgagacaggggaatcacttgaacctgggaggtggaggttgcagtgaggtgagattgttccactgcattccagcctgggcaacagagcgagactctgtgtcaaagaaaaaaaaaaaaaagagatgaccccatatcctgttcccccagtttccccagtggtaacatcttatataaccaaagtacaccaccaccaccaggaaactgaccttgatccaatgcatccgccttattcggatttcaccagcttcacatggtattgtgtgtgtgtgtgtgtgtgtgtgtgtgtgtgttcacttctctgcaatgtctcacccatgtagcctcctgtgatagccaccatagccaacatacatcatagctccatcacaaagatcctaggctctactctttcgtccctgcagtgacctccctccctgctccatatctcaggaaaccttaatgtgttctccatctttataattttgtcatttcaagaatgctatataaaaagtatgtgaaaggcttcatgttggtcaccctctgtgcatgtgtgtggttgcagaattagtcctcacacagagcttgattgtctacttcacttcttgacgcactttcgttcctctgtcatctcccatctcccttttcctgcagatgtattgggttgagacttctggattaggtaccctgttggccctagtatgcagcctatcacccaatcaccacaaccaccctcatcccacagatgggctccagatgtcactgtgtggaggtcctctatagattttcagatcacattcagtcactggaggccaagacactccctgtcactctctgcccaaccctccattcctaacctcacctctcccccacggccaacctaggtccattagccatgctgagcttgaggataagaggactagtttccattgctggtccatagtttccaccccagaagcctccatgccccatactggttaaaaagttattgcagaagaggtttgccagaggtaaaccaggtcttccagagtataccagaaaggactgcatgttgtctgtttgagtgggggacttcatgcccaattttcacagggcaaagcatctcctggtgtcttgtgtggcaaacagctttgatacttgcccatgtcccatggtgtccaggagacttttcattaaatgaggtgaccactgcccctttagggcgtgagccaggcatctgagatggagattacgcattctgtgtctctgcctgacacaacatttctgttttcctgatggcttatctgatgccattaaagtctctacctgtaaatagtcagtagacattgggtatgaaagacccaaacaatatttggctgaactgttcgttgccacagagtattattagattagattggatcttagatattgaagaatttttactcccttacttttgcaaacctggaaaaaaaattgatgctatctgctctctagaactaatactttatggtcttatcctcttttctcctctctctcactgtgtctgtgtctctatctctgtctttctctgtcttcctctgtctctctcacctcttttttctcttctctcctctaaaggaaggcattgactcttccagagccactaagagtcgaggtttttttttgttgttgtttctgtttgttttgttttgtttttgagaaagggtctcagtctgtcacccaggttggagtgcagtggcacaatcagagctcactgcacccttgacctcccgggctcatgctttcctcacacttcagcccctggagtagctgggactacaggtgttcgtcaccacgcccagatagttttttttgtatttttactagagacagggtttcgccatgtttcccaggctggtctggaactcctgggctcaagcagttcacccaccgtggcctcccaaagtgctgggattacaagcgtgagcaccaccaccgtcccccacccccagccaagagttgtttttatcatgtccttagtcttgttggttgctgccttgtccctttacctgttgttcctcttcaatcattgcaacagtgacactccccttagctgggcatcaaacacagacagaagcatattcaattccaggagtctccactgtctctcatctgaatttaagctggacacctcgcttgtgaatgcagaggggccagcatcccactcccgccttggcgcaatgcaaccggcacctttgagggggcagattgtattgtgccttgtcaggcccaccacggcttttgttttcctgcgcatttgaataatacatctgattaccatggcaaatgttgcggcatatgcaagcttggacctcctgcctaattagctgttgataacagggccccctgccctttcccctctccgcagccctcagggacatgacagttcttttatctttcttcaaaattgacttgctctcccgaccctccagtagttcctgttttgtctgtttacctctcctgcattttgcaagactgttaattttccgtggcacctcctatctggttgtaattaacacatcgcacactgaagaaatagttctgctttttccagatgcctaatggaggcatgtccttttttttcttttctccactaattataccactgtattttagcaacctgcattgacctaaaaggatctgttttctttctttcttcctttttttttttttttttttaattgttttggttggaagaataagtatggttttagaacccagtttgggcagaaactgggaagagaatgaaatcattagtgatatatgttgtcactgtttcttttcatagcctttaaagtaacaaatgagggtacatttgttgtcagccttcctgttcagcgtttgacaactctttgttagatgtgggtaacgtttgctttggatatatgctctctctccagtctaaatattctgccgtggtaattatacagatggggcacatgacctattccgtagagtgtggaaattctcagcagattgtaaatagcctctcgtcctattagattttaaggaagctaagcccttgcctcccaaacatgagacatggaatctgtttatcatcttatgcttaggcttaagatttaagctgtaatgaatactggttcaaagagattgaggtataagaaggaggttggtagttacagcaataaaaacaggagcaaaaagagcagcttttgtgaaggactccggctggaataatgatgatagaattgtctaaatcgatacatctcttgtcagactcatgtctgatgtttgaatcaaccaggccttttctgcaagagctttcctcaagaatattgaattatttattatttgtatctttttttttctttccctttctgatgattttttttccttctgacttagtgaaatttgtttttcatgctgccaggttgaatgttgtctactctttgataaatagcagtaattgggcatatagcaggggtcatgtacaaatgtatgacttcaattacatctagagcatttttttctttatattgatcttttttttttcttataagatctgttctctatagcctgtggtactgagtactttaaagaattattctttgtccatgtatgtcagcatgcactttcaaatctatatatcttttaaaatatatatatatatacacacatatatatacatatatatatatacacatatatatatacacacacacacacacacacacatatatatatatatgtagtcctgcgctttcctgaggctgtacagacgtgggaggcgaaattgtgacgcctccacttgatgaaccatacctgactcttttgctcatcttgcagtcttgtggcggtgtcatttctacggttggcttttcttgctacaggttgggccaaggtggagaaggcactggtattgaccaggaaagttgtatgtaatagaaattgtagagcacagtaggagaagaaaagtgaaatgaagtagacatgggaggcagaaagacaaagagagagagaacaacctatgttgtaattgaagcttaagaaaataccatccttggacactttcttgtttctgattttatctaagtatcttctggttgattcttaaactgcatgtatttatggcacatgtatttgccagtttaatggacacttttccatctaggactgtttatattcaggcacccatacgtacacatatttccaagggtaaataaacaccagcctgaatgtttggtgagattagctttggcaatagtgacatttcccaggcacagccaggttttctaaggcaggaatctgaggtctgatgatattactgctctgagcgtacctaacctacagtttgaggaaataaaaggtaggttggaagactgccgaggcccccagttggctgctgcttccagagactgcaggcttactcagtgcttactgtcccatttccactggcctggagatggcctttgccaaagggcagtcatagaaataacaactccacatcattccttgtttggttctgcgtttctgtaccatggcatcgtgctgtcgtcagcagttttctgacatgcaaaataatgatggggcactgaattatattttgtaagggcatgcaaatagagagtgttcatttcttcagcctttttgaaggagaagtgagcccttaaaagtcattttcgggtaggaagtgtacacacattattttatgtcatgcccagtccctaaagccatatctgttccatatttttcagagggagaaaatagaataaaaaccctcagaggctctgagtgataaaggaaacacagtctcagttattatgctgtaggagatgaagctgggacttaaatagacaaagagaaatggagttggctttggtcgagcctgtgattctgggccacatcgtatttctgtgtgtatgtttgtgtacgtgtgcgtgtgtgtgcgtgtgcttgtgcgagtgagaaacacttggatagaactgcctctcccaccagtaggctgttaggcacggcactcagaaacagccctattgttttagatttcctttcatatcatgtaggcgtctataccatgccacccacacaggagagcaagtgagctgtgaaatatattcattgttagagtactggggaaatggcggcaagcaatcggaggtaataatgtccgacaggcaagggaggctgccaacattacctgcattatttcggttgcctttttcattataggttcgggaaataggcagcaattcgattatggcatgatttggggtggaattgcttgcactccgtgaccccgtcactgggggatcaaatgagaagtcaaatcaaataaagttcatagtgcattaaccggatggagcagtgccttacccactcagcacgatttttcatcttccaggggtttgtgactgcagcctagatatctctgcaccttaaggcatggggaggattggctgagatgtataggagtgaggagaggcggccaatagtgtgcaaacccctcccctcccatgtgtagcgccgagtttctctgcagcttgagcaaagcagtgtgattaataacaaggaggaaacctgcttgttggattattaatttcccatcccctttgccttattttttttctttgccatattcctgatgctttttcttctgcctcttttctttttgccatttgctaaagcctctccacccctccttttccctcctgtggcccacacttttgcccatggagatatccactagtcctttacactgacacctggccacccaacctcgtgccggctggcttcacacctggggtgagtttatctcttcccttcggggattctgtctctgaaactaggagagagagaatgagggagaaagagagagagagagagagagagagagagagagagagaatatgaatatgggtccagtggtgttggagccctgctgtattttaatcatagacttggccttcttttaggagtgacccaaaaagcaagaccagttcgtggggtacctgtatccaaccccatttcagctgctgtgtggaaaagtaggatttctcatagttaactgattaggtattttctcaccagttctaaacacaaagagtgcatcttgcaaaaatataaaaagttgtggggggtgggggtgcaggcaggggagataatgactggtaattgcaagctgtcatactaaaagatatttggggtgcaagagttacttctgccagcagaatggtagaatggaggaagggggagatttggaaggctttggggtagcttgtgaggggaggtactttgcattaaaacttctgtcaccatctgtactttcgatttcacagtcctaccctcacactactggaaaggagagtttcatactgactgtgggcacaggggagtggtttgcaattgcagcttgtgctgtttatatggtgcatgtgatttggggaccttctgggttctgattcgctgacctgcccagaggaggaggctgggccactttcttttccacattatgtattgcacacctctgttctgtgtctctcctcacctgctttgaaggatttctttccctctctgcaaatctctcccctcccgtaaatcagcatgattaaatagcagaagggtggaggtggcgccatgcattatgcacatgagctgtctttaccagcctgtccatatgtctgaaggaaaccttgtgttttaatcccaagaagtcaccttttttgaagattaccttgaagcatccaaaagctaataggatggagaactaaaggcatttgacattaattgttctgtctatttatataacttaagcacaaggcagcgaaaatcttccaagctgattatttctttggtttattctgagtctcttttttaagcattcagagcttcttaagtaatgaatttttaggaaaaagagccatgcaatgataaagtgactccagtagcagatttttgtcattttttttaaaagaagtgctcaaatagggcagccatgaattttatttgtgtaatttacacttgaatatgaatatatatatatacatatatatgggggtgggggtctagctctgtcacccaggctggagtgcagtgatgcaatcttttctgactgcaacctctgcatcccaggttcaagcgatgctcctgcctcagcctcccgagtagctgggaatacagaagggcatcatcacacccagctactttttgtatttttagtagagacagggttgcgccacgttggccaggcaggtcttgaactcctggcctcatgtgatccacccacctcggcttccaaaagtgccgggattacaggtgtgaaccacctcacctggccatacgcttgaatatgttttattaaatatgagattactggtaaggacttgatgtttacatcatagctgttcacaaggtacataatgcatttattttgtttcttatgtagtgcccaggataagaaggaaatgaaagaacctatggaaggggatacaatttcagctttgacagtttgggatcatagtattatcctaaaagcaagcaaacaaacaaacaaacagtgccagctgaaacaatcacataatcacctttctagttattttttcttcaggttctgggtctccctctggaaataacaggtgttattttgactgaatgaccccctactgaggtaaaatttggagcagaatataatacaaattatattccaaaggtgataagatacttgggagtttgagcaccaagaagaatgttatcttagagatggtatgagtataatacaagttggcattattattattttgacataaaagggggaaattattgtaaatctcagtgtgttgtctgtatcaagtactcattttttaaaatatgttttttttccagggaaaggcttatactgttgggaaataatttcttttagacatttagagaaaaaaatgtgaaaattatgttttgaagtgcatttttgctgtagaatgctagaagtccattgttgtttaatgcttcatttacagcatgcggatttacaacacactgaatgagagaagtggggtttaattttttcactatgacttcttataaacccgcaaggggtctatttgatgagtaatagttgagttgacttttacctacgagttaccttctccacgtcttcattgcttcatttttccctcaaccggatcatgtaatagaaaacttcctcaaaacctgttcctacttgagaaatttcaaaggatggaaacccttctttgaaggacttaaaattacatttatatcaggatgaatcatgtttcgactttaaatatcaccttatttctggcggtctcttttgtttccaagtggcaaatgttccttctgaaattacatagtttcctcttgctcattctgtttctaaacttctctggataaatgtgtgaaaataaatgaaattgttaagccctgagaataagcttggaaaatagaagttatcctacctgggcaaaagctccaaacattctaggggggatagagacccctcctccctcttttaacaaatcctcccttgaactggggagagaaaggatcgccttccaggattttttttccctgacgtgtaacagttcttaaaatactgccttgttaatttgtttctattttacatgagcattatacaaacagtgataaacgaaatgtatcattttttccccataaagcctcctcccagattctcctcagtgtttacagaaatgtgctgtatccatgagctcagatcaattgtttatacacattggtgttcatttgttcaaggcggcatctgggcctcggatgtcgggagagacccactgaggcaaagcactattaatagaaaggcttatctcgtttaagggagtaatcattttaatatactcaggaaaaagccagcgtgcaggctcttggcccacccttgcctaggcagggtctacaccttccagaagcaaacacagccgaaaagagctcttaaagaagtgattacagagtcatgattgctctacaaattgagtcttttttctgcttgacagtgatcctggcatcgtctccccgcttaatccttactagcaatttgcctatagttgcagctaacaagaggtgattagaggggagttgccagtcaccacttaacacccagctctgggggcaccatgggcacaggctgccgaattgggcctgttttcttattaactccccacctctgaatgcattagcccagctcttagctaatgatagttttcaagcaacagcgtgagttcctgagcagcatggtgatctgactctccagcatgcagctaggaaaattaggaaggagagggagaaagcatgttgttcttcaaaccaaatagatgcgccaagggagaggatctcccccaataaaattaggcgcacgctgtgctgcgtggctgtcttggtcttggaggttgtgggttgacacaagaaggggacatgatgcgttgcatattttatctgtcctgtggaaggtcctgagaataccaacagcagtggatcttgggttagaagctagagtgaagtggtctgcagacaggagactacacctacaggggtgtaagcagagaggcaaggcaggctgtctgggggacaggtccttggttatcatacatgagggtgcatcagcattcctgcacggcttgttaaaacctctgagtctgtggcagatacacaccatggaatactatgcagccataaaaaaggatgagttcatgtcctttgtagggacatggatgaagctggaaaccatcattctcagcaaactattgaaaggacagaaaaccaaacactgcgtgttctcactcataggtgggaactgaacaatgagaacacttggacacaaggtggggaacatcgtgtgaccggggcctgtcatgcagtggggggagcggagagggatagcattaggagaaatacctaatgtaaatgacgagttaatgggtgcagcacaccaacatggcacatgtatacatatgtaacaaacctgcatgttgtgcacatgtaccctagaacttaaagtataataaaaattaataaaataaaataaaacctcgagtttctgattctgtaggatgtaggacggggccaagtaatttgcattctaacaaatttccaagagatgctgatgctgctggtctgagaacccccaagtttgagagcccctgctgaagttggacaggcttggttttgcaaaaatgcgaaacgtaccaaatgtaccctccggtgacttgcttaacaactgtgtgtagctctcccagtgcagaagaaaatccccagtctctaaccaacttctgagacattaggccatcctttcccctccaattttaccttcccttgcccaagctaatttaactctttctttcttttcttttctttttcttcttctttttatttttttttatttttatttatttattttttttgagatggagtctctctctgtttcccaggctagagtgcatggagtgcaatggctggatctcacctcactgcaaactccacctcccgggttctagtgattcttgtgcctcagcctcccgagtagctgggattacaggcatgtgctaccacgcccagttagttttcatatttttagtagagatggggtttgaacatgtttcccagcttggtctcaaacccctgacctcagatgatctgcctgccttggcctcctaaagtgctcagccaccatgcacagtcttaatttagctgtttcttgaacatactccgtgcccccatatcagatatctttttacattccaagaatgtttctccctcctatttgctcatcctaaaagttcttacctgtcttttaagttgtggctcaagtattgcctcctccaggaggccccagctgcatttgtcatttcctccaaatctgaactccttatatgctgttatgtgatggatgtatcacgttgcatgatagtgcttacgtatcttttcccctgaagtcaggaatcccttttattcatttagtttctccaacacctagcattgctattggcatatcgtcactgcagtcaactttttttgttgaataagttttgtatgagatatatttgacctatgagaattaatatctttttttttttttttttttttgagacggagttttgctctgttgctcaggctggagtgcaatggcatgatctcggttcactgcaacttttgcctcctgggttctagtgattctcctgcctcagccccctgagtagctgggattacaggcatccactaccactcctggctattttattattattattattattattattattattattattattattatttgtagttttagtagagacagggttttgccatgttggccaggctggtatcaaactcctgacctcaggtgatccacctgccttggcctcccatagtgctgggattacaggtgtgagtcactgcacctgaccagagaattaatatctaataagcgaagaccaaacattggagtcagacagcttacatttgagtgttcacacaatgatatatgtggatttttctttctttctcttttattttggctttgagggcaattcacttcccctctctgagactcagtcttactcatctttataatgggaataatgataatgataacagtagtagaagtagcagcagcagcaacagtagtagtgagtgacactactcacatctgcacatgtaggtcgtaaagtacaacacagtacaatgcctggcgctctgcaaagaaaaaaagtgtatcaacagacaggaggatttctattgttgtccttgattctactgtgagacgtccacactggtggaaaggtgacctgtcttgtggaaatgaatgtgtggaagtggagaggacccgactccagagctggtgggaaatcgagcggcataaggcttttctgacatctcctgatgtgaacactgtgaatataatcttgtgaaccagagcaagtggaggggacatctactggacagaggcacagcaacatcctctctctggtcaccccttccctgctcacccatccccggccatgctggcttcttcctcctgctgaagcactcagggatctcaaggacttggcacaagccatcctgcctctccttccctcacccccttttcattcatcagctgttgattttggtgtcaccgtcctctgagaagccttccctggctagcccatcaaaagtgatcctgcccagccaacttttattctctctgccagcacactgtacttttccttcatcacattcatagctgtctgcaatgatattaccttgaattttagtttacagtaagcttcaagagaacaggaagccacctattttgtcctctcatacacccagagcctagaatctagaggaggtgagcagaaaatagtcgtcaggtggatgaatacaggatgggaggaactgataaaaactgccatataaccatcatgggacatggcaaaggtagataatatatcttttcccttgggaatttacaatttttattgggaaaagtgcatgggtagagtatcactcagatatttctttctgtgcttccatagaccctattatttccctaacagcaaactctgcctttccattcttcattactccaactaataattattgagatatactatgtattgcacactcttctagaagctgcagaatgtatcagtaaacaaaatacacaaaaatctctgcctttgtgggacttgtgacagtgttgcattgacctacttactttctccctgcaatcattgagtttctcttggtctagggccatttgtcatcatagtttttccccagctcctaacatgattcttcacagagagtacatgctcaaaacaaattggcggaatgaattgatttttaaaaacttgttctactttcttgccactaagtctataatccaaccaaatgagcttatcattaatctagcacatttaaatatttttggataaataatgttccattggcccacagtaactattccagcctcatgtcttcactcatagccattccctatttcgaaaattatttattgttttgttgtggtggtggtttatgcaattcccaaaagcaaagctgcagcatcttactgctgataatattttgaaacaacttccttctttgaattaaaaatggtacccacctaggctgggcgcagtggctcatgcctgtaatcccagcacttcgggaggctgaggcaggcagatcacaaggtgaggaaatcaagaccatcctggctaacaaggtgaaaccccgtctttactaaaaatacaaaaaaattagccagccgtggtggcacgtgcctgtagtcccagctactcgagaggctgaggcagaagaattg[136 bp omitted]atggcatggaatagtacattggacttcaagttcagtggccagggtccacacaggaagcctggtcgtcttgctacctggatggccaagtgcaagtcacttaactttttataatctaagcatccttattcataggaagggggcttggttatcatgaatattaaataacgtgtatgatgtgactggaaaagaaccagacgtagggatatgccaaagaatgtttgtttgctagtttcttagactcagaaaaatagaagcacgtgtacttgaatctatgttgtatggtagttttgctttcacaatcatcaaacaggagtctaagcccaccctggtcctctggctttctactaaggcacaggcagcaccagcttttccataacaacaacctcaaacccaaactgactaattatctactgtgtgccatgcactgtgctagtgttttgcgtgattatctcgtttgattccttaccttaactctaacaagggatcctattttttacatgtcttttattattattgttgttgttattttgagtaggactctcactgtgttggccaggctggagggcagtggtgcaatcatagagctcactgcagcctcaagcttgtgggctcaaggaattctcctgcctcagcctcctaagtagctggggctacaggtctgcaccaacatgcgcagttaattttttaattttgtgtgtgtgtgtgtgtgtgtagatgggttcttactgtgttgcccagactggtctcaagctcctgaactcaagtgatccttccactttggcctcccaaagtgtgggattatgggcgtgagccaccgcgccactgtgcccggcttaatatgtcttttatttttaaaaaatgctggtaaaatacacgtaacataaaatgtgtcatcggtgatatttaatgcaaccgccatcactgtccagtttcagaacatttttattacttcaaaaggaaccccatatccattaagctgtccctctccattctgtcctctccttagcctctggcaattgctacagaacaaagacatggagaggttaagtggcctgctttagacccacattactgagtggcaaaactagtatttgaggctgggaagtctgctaccctagtgcagaacacttaactgttaaggtaattagctccccattagaaagacctttcccccaccatccagttcacaggaggcaggggcttgtttctagctaacacaaaagatgattttctctgaggcctcattacgggatgccaagcattcccaccagtgggcagcctgtggcacctagaaggtccgctccttccacttgctttccttacacccagcccagtgggaaggagggtgtcacttcagcagtgggggcagatgggtcttcagatcccacaggatgcccccacactgtgctggtcatccaactcattgtcaggtcagcaggggtgcctgctggcacccagagcttttgcctggggcggaaatgtggctgtctgacttttcttagttttcatccttgtcttaaaggtaggatgagtctcccaaggtgggatagaatgctgggagagaagtgaactttgggattttggtaaaattctctgcacaaataactcccagagagaagggtaatctgctaccccactcatctttactctttgaaaaatttaggatcccaatcccagaagagaagctttttgtgaattctcctaatgcaatcgttgtgcttactgaggctgcttggagagactgtcactcaggttgcattgcaccttaaagacataggatttcttgtcttaacaacaggtatgcacaaacattttttttataaaggaccagagagtaacacttttaagctttgtgggccatctggtctctgtcacaactactcagctctgccattttagtgtgaaagcagtcacagacaatacataaacacatgggggtaactgtgttctaataaaactttatttaccaaaacagatggttggctgaatctggcctatgggccatagtttgagagccctgtcctagactccagctgatggccttttctgtgatgtgtggaatctcccccaagcattctgttgattcctggaactatggctcctttgctctctctgctgcttcccagcttgtgaatttgcattcatggtcatctctgttttcaggccatcataacacagaatcaacagccttatggtgttgccccagaggattcaatgtgtcaagtggcattttcgaactgtgtagaagacttctctgcagcttctgtggagggaaacagggaaggaggtttatatcttgtagcccccagcaaatgccacgcaaaattcccgcataatcttgttttcccaggattctttctcagcagccttggaagtgggatagttggggttggtgtgcccattgaattcccccaaccaagtactcaaacttgctgatcctcccttctttccttctgggacttcttaggaggaagtctataaaatctcttgtctttaatatgcaaaaaggttttcttgcctcttctagtaaaaacacatagtgggcagagacggtgagtaagggtccagttctaattcaaaccctaagctcttagtttgcattctccacaataaaggcagtagtctctctaaaggaaattctcactgatactttttctcctccccacgtcatcatagagacatggcatggcctttgttctaaggaacttcaagtctaataggggataatgaatgttccatgtagagcagatacaaaacagtggactgagtccataatgctgtgttggagtacagacaaatgcgcggtgaaatcttgctgaaagactgcatggaggaggaggcatctgaattgagtcttaaggggttcatgtcacacaggtgaagcacactgacttcacgtgtttgaagagttgtctgggagataggttaccaatttagtttctacagtatcagagatagaaaaattcatccatcccttctaccatccttctgtccatccatctgttcatccacccatccacccaaccacccatccatctaattatccagtcatctaactatccatccagccagccagccagacagctagccagccagcctttctaaaaatacttatttaacacctgtgtgtgccatggagtaagccaaatgacagggagagaaaggtaaatgaggccatctccaaaggagttcagagaaaggtggtagataggtatgttagacaattcatttataagctgaatagttaagtgcaattttgagtatttgtgagaacgatgagagggaacagttaatactattggaaactgctcttggaggagtcaagcctgaatgatcagaaagacactaaaagatgtaaagcaggtaaaaaggaagaaagatcagggctgattttggagagcacggagtaaagtttcataaaccaggtaagagcttaggagatgacagacatgtggtggtataagagatgaaggaggggcggggcgcggtggctcacggctataatccccgcattttgggacgccaaggcaggcagatcacgacttcagaagatcgagaccatcctggctaacacggtgaaaccccgtctctactaaaaatacaaaaaaattagctgggcacagtggcgggcgccagtagtcccagctactctgaaggctgaggcaggagaatggcatcaacccgggaggcggagcttgcagtgagccgagatagcaccactgcactccagcccgggcgacagagcaagactctgtctcgttaaaataaataaataaataaaaataaaaataaaaaaaatcatcaggagatgaggagatggactgggaaataagacagaggcccaaacactaagaccaccatgacctactggactgcatcctttagaagccctaaggggatcctaaagtttagaattctaaataaacattttattttagaatacttttacatttacagaaaagttgtaaagacagtccagagagttcccatctacccagcgtctagtttgccctcttgttaacattttttttttttttctttcctgagattgagcctcgctggatcagccaggctggagtgcagtggtgtgatctctgctcactgcaacctctgcctcccagactcaagtgattctctagcctcagcctcctgggtagatgggattacagacatgcaccaccacactgggctaatttttgtatttttagtagagatggggtttcaccgtgttggtgaggccggtcttgaactgttgaccttcagtgatccgcctgccttggcctcccaaagtgctgtcttgttcacattttgcatttatcatattttacatatggtacgtttatcacaactaatgaaccaatattgatacattattgttaactaatgtctacattttattcagatttccttagtttttacctcgttcttttctgttccaggatgtcacattacaattaattgccatgtcttcttctccccttctggtctgtgactgtttcttagactctgcttgtatttaacgaccttgtcttttttggagtactaagcaggtgttttgtagtgtgtccctccactgaggagtttgtctgatggtgagactggagttatgggttacggagaggaagaccacagagacagcgtgccatttgtatcacaccatgtcagtggtacatattatgaaaatgacttatcgctgttgatgttcaccttggtcatctggctgaggcagtgcctgtctcatttttcctctctttgcatactgtgctctttggaaggaaatcactatgagcagttgacacttacgggtgaggtgtttgttaggcttcacctccttgaagcagcagcatctacatccatgaggcttttcagcaggacctgggtaaaggaccatcaggtggaaaatgcaagatgaactattgcaagccacattgaaggagaatttggctcactaccaggaacattgcctgcccccgaagctatttagctgtaggttttggccttcaggtgggcttagttgcagggctaaataattttctttaaagagcttcatcatccaggcaaacatcacagccacagtgccagatcctgtgtcaaagaaattaaaggctcattcctccatgcactaagttgtgtcataactgtaggagttggcctgctggggtatgtgtgtgtgtgttttcccatggaaatgaccaaagcaggcagcacttgttgaagtacgtcaacattactgcagcacgtcattccttttatgacatagcgacctcttttcttttctctgcgctgtgatcttcagttaatttttagggagggtggggcatgaaagctccctgaacatcgtgagaatttctttccacagatgcaaacaactctgttatggagagtgtaactcaagatagcctttttggaggacagattggaagtacatttccagttctcacattcctctcttttgaccgaggaatttatattttttcagtagaagtcattctattcttattgtttttgtttttatttttctatttgacaatgaatcgtgagcatctttcctatgggtggatgtttatgttatttccggttggttttcccatcctctttcattgtatgccaaattactgtggtaggcaaacttggacaaacgtgtttgaacacatatagtgcgtgtcatatattttgtaataactggaatttcctgttcaaaggttggggatgtgtgaaatttggacagtgtccatcagatcactgtcaaacacaggtggagacatgtgtcttcacaacccagtgcaacagcatggcgttatgcctcatccatccaacaactctagggggcaggcataagtagtcccattttaaagatgcataaactgaggctccatgaggttaaaggattggcgctgggttaactctttctttgctatcaggcatttgcggaggatcactcaggaacctttgaggatgagatgtcctgagctccagctcctggtgtctgacctcccatctcagtgaaatagctagaaaattatttggtctccttgctgagattttcttaacatattttaaaatctcagcctggtgcagtggctcatacctgcaatcccagcactttgggagaccaaggcaggcggatcatcctaagttaggagtttgagaccagcctggcaaatatggcgaagccccatcactactaaaaatacaaaaaaataaataaataaataaaaatagctggtcatggtgatacgcgcctgtaatccgagctactcaggaagctgaggtaggagaatctcttaaacccaggaggtggagattgcagtaagccaagatcacaccactgcactccagcctgggtgacagagcgagactctgtctcaaaaaatctcctgacaccagaaagccacagagcagaagcatcacagggctctctgatttgccataggatcgtttaatctgttttatgatactgtgctagtagaattttccaagttcacaatcacaaacaaacatactatcctcaactgtgctagaattaaattatctttgccccccccccctttctgttatattaaattagtatccttcttctccaaacaggcagctcccactttgagggtgggggaggagtacttgtccatcaaacatggggaaaatgactcctacttccatcgcacagtgaatcataggctctcccatgtcagattctgtggaaaggatgttaatagagacaaaaggacactgttggcgcgttattaatgttaaaaattgttgacgttccatgcagtgtgtttttctaattagagccaagctgcagagtaccatttccataatcaacatgggaacggaaactcagcaaaatttcatgtatttgcaatgaaactgctccccggcaacataaaaatggcttttataacataaaggctgtaattagaataagtcaaatcagttggaaacgattaaggccggagtaggcaaagctgccttctaaatatttgtctggagattagcctactcctgcagctctgagaagcatctttgatttacttatactgctcgacgtggcaaagataatcttgtggaaggcaaacgaatacagatttagatgtgctggtcggccccttctgcaacttgacaggaggcagtccattggaagcaaagtcagaaaaaaaaaatgaatatagggtcatattagacaaattgcttaaaaaaaaaaaaagcacaccgcgatcatcaatttaaattcttttaaaatgtgctaggtctttgaagcttttaggatgcactttagaagtccacgtggaataatccctgcatgtcagtgcgacagttgatgtgcgtctcattgtatttaaaattatagttctgagatgggacttgctccgcgatgcttgtctgacatcagctattaaaatacaagtaaatcttggcaggtgggaatttaaaaaagaaaagattatataagaaaaatcagaatggttaatgttaatttactaaccagggtacagtggctacagagagttcttcatgtcctctctctattaagatgctgatgcgagaaacaccttatgtttgccagggatggggatggagattgtaaagtggatgtgagggggtaaagagtgctactttggatgtcagtccatggtttgggtcctctggggccacggtgagcatgatggtgagacaggttcattttattaaattcagattagccgttttgccctgtcctgggagggcagaagaaggtaatcaaggagagatggcgggacaataactgctctggggatcagactggaacatccacggactccagccttcctttagaagggcgtaattcgtcctcacagactcctcactcatttgtaaacctctctgaatcccaaacttgtgtgcgtgtctgcatttagccattgaaaatataatcaggctaatgcattctcttactgaattttaaaccagcccattaaaactcctttaacgtgctaaagtcggcttcagagagggtttccatttcatctttattgagctgaggctatggttcattctccctttgcaccacagtgagcgcctgtcaataattcaatagcgtagccttgatgggcccaggcccaacctagactttcaaccacgccaagcagcttgtcaaagcctgatgctctgtcaatggctgagtgatctatactgcatgaatcccccccttcagctcttgatgtgtccctgggaataaaaagaaagccatttcagaagtcagcccagtgagaagcacctgtatgtagagaatctttaatgagggcaggtcgcgctgtggtggagcagagttcagcggaaaccaccgcactttgttttgttgagccaacgcagagtctctctgtgcactctcagtgtgcacagaggagcatggtcctcgcgctggcaaatggatgcccttgtccttctgcttaagtcttctttacgcaggccttcgcgctgtgtcgtcttcaccattgcaggaggccttgaactcagaaaatccagtgcaaggagcaaaacatctgaatcatatgatcatgccccagtggctcttcttcaggtgccagtgacggtgatttgaaccttcatgtccctcttttcatggaacgtcatgagtctgtactggctaaagagtgctgtgaaaggcagattaaaaaaaaaaaaaaatccagcctcacctttctttctgggtggaggaaaaggcatccattcactttaagaagaaaacaaatcatttgtattcttcttgtctggacacaatttttaacccagaattatccacctagttcctcccatctccaggccttgtaagtcgataggagatttgcaaatatctcccttaaagaaaggcaacgaggagagcatttaatccatgctttaaatgcaaaatgtcttgagtcccaacgctgctcagtttttcctgaagataaattttagctggattaaataactgttttaaaggcactattcatgcaagtgctgtctcatttgtgactgtatctgcattgctaatggatgtgtcttttcctcatgcatattctttcctgagcatctaccgccaaatttacagattgcttgcttgtcaaattgggatggggtttgaggaagaggtgacaatgatctaggtggaaaagagaagtgccagtgtgttcaaagctaatagaaaattgttgctttgtattagcagtcaaggctccaggtttcctgaaccacaaaacaaccaaatcttttctttcttttttttttttttttttttgagacagggtctcattctgtcactcaggctgcagtgcagtggtgagatcacagctcacagcagcctccatctcccgggttcaggtgatcctcccacctcagcccctcaagttgctggggttttgccgtgtcgcctaggctggtctcgaactcctgggctcaagagacctgcctgcctcagcctcccaaactgctaggattacagatgtgagacactgtgtctggccccaaatgttttatggtaacataaattcatgccactgtggcctgctggtcttcccaattaaacagcagagagtttgttatcccagccacagcatattagggtggagccaggtaggtatgtgaactaacactgtgaaaaaacaagattgtttttaaggtaagctttcgaggagggggaaaggaggtagaaaatgaatatggtgatttcagagaagaaaatctctcccaagcctatgtccctttgtatgtccacaaccccagttaatgatgggtatggcttatgaaggcactgagagcccaaggaatgtggccagcattaggcggcatttgagctgggtcagtgaatcctcaggcgtataggcaattaggacttagagatcctgttgtgattttcatacttttaatctggagagttgcttaatgaatttattaattcatttatttttagcctcacaggttttgctccaagactcaggtgaatgagtaacacagtactgataaagttgagcttttctgtttagggctggggaggagggaagaaggaaaggaaatgaaacccagggctttgcatcttcctcttcaacttcatcccttcctctctattcctcacatttagcagccctcaagggggctacaaggaatttttcagggtccagcgtggcctaatatgccaacttctgatatagtacagctcaattagcctggcatggttgtgcacaaatgtagtcctagctgctttggaggcagaggtgagaggatcagttaagcccgcccagagtttgacgttgcgctgagctaggatcatgccactgtgcttcagcatgggtgacagaggacccatttcttaaaaaccaaagaaaaaaaaaagacagctgttattttcctaagatatcctctttaaagagaaatggaacaagtgacctgccttcctctatatgaggtggggctcacaccagggttctcctgctcaccattggcccaggaaactcaggaaattaatgctgcatgcgcatgacttggcgattcgacctctgaaagctctgcaaggctaggaatttatgctttaagaacaatcagcatcaaaggccttggcagtggtggagctgttagcatattagttccatttgagatggtgaaatgccttggaaactaaaaaccctacctaataaagtttattttcaaaggattagaggtagagttttgctctgagagatgatgttgcctaagcctcccattacagaagagcagagatgggactctagggattcatggatgtgccagcgtcactgggtagtggtaaaaactaaaactggtatctgtttctctcctactataatatctttttcacgtcagggcttgtaaacctgaaatctacactttagtttcacccatatgatttgtttttgcttttttcccccctgttattagctgccaacatttagatatgtaaagattacatttaaaatcgaaatttttggcttcttgcaaaaaaatcagacgatctggcatattgagcaacatccgcacacttcacccaccagctggagctctgtagcacctgcacacctcagtgtggagatgagctttccactcccaggtcaacacagaccctcttactcaggactcaccttcgcccagcctgcttcacgatccactggctgtcacaggcatttgcctccgtagtgctctcctcccacccttccacaaataaacgtgcccagagatgctggcagcctggaagctttgcatctgcattggggctgcccgttctttgctgccatgcctgaagatttcagtagctctttgtcagcacaaatgagcttttcccctagttcatggggagaatgggatcctggcacatagcagaaaacatctggtaatgaatccattaggcaggctgttgctcagcctccaggtgcccaggggtctgagtgctgggctgaacatgatgcatgaacgggaccccagagattttaccttttggccttcgttctgccagagctccggcttggtcctaaggggtctcctgactactccaatgccaggtgttctccccagccatccccaagcgagaagctggccagccttctggattccctcctctgccttctccagcagcagtccgtctcccagcacagccttccttaggcacacaaaggagaagacagagatcatttttggcagacgtaaggagcagcatttgtcgaactctgggccctgcaactctgtgaacagacctgcatgctgtacaaaattattagaagccctgtgtctcagggctcaaggaggttgggcagggaggtgagagtgaataaaaatgaggaggccgcaaactgcttttgcccaagggctggttttaatgagcttgtccctaatgagttgtccctgcaactagcttcaggcctaaacagatgaggcagggattctgctaaatttttgataggatttgcactggttttatgagaaagcaagcagtagagagtgcaaagttgggtcatgaatcttttacgagggtggatggttgtccgtcttgtcaaccggaacgagaaagacctggttgctaatagaaaccatggcctcagacgtcgatcgtcacccaccagatcagctaatttggtcagggtggctgggtgatttgttttttttctgattcaggacctggcctatggcccctgagaaggatttatctgaaaactccatcaaggagatgatttgagccattgcctgttcctgactaatgatcttttgtggaactcaagccatattggggatttatacctttctcccatagtgcactgggaaggaaacaccatcaaacactttaattaacatcctttttactttgggcagccccattcgtatcaaaaccacaaaccttacccttcagttgcacgagaacactcttaccaaggataaaatgtgattttcgattcctatggagatgtttctaatgtttctaacacccgtcaattctaggatcgcgtggtacaggagatttcatgtactaccaccttttttttaaatattaaaagctgccaacaaatgcatttctccagtttgattcatataccaaaaggcaattttcttggtggcttagaaggttacagaaaatgcttgatcagcagcctttactgtgctgagtgaattcctaccccatccccctcctgtctcacacactctctttcacattaatcatgtaattgatttaataagctctggcttcaagagctccccctcccctctttctttgccccctccccctctcttataagatttcagttcagcgtttgactggtaggctaagaaccttgaatcctgccagatatgaacccaacaaccttgttggtgtaataagtatcctcatcttatatttctgtggctccttgaaacataatttttaagccatttcattaatagagttcaatgtaataatgtaaaaaagtgcagcgtatttctatatatgtctgtagatgtagacttctgtatatatctacttttcacaaacttgaaatcatttcacatgtgttgtcttattcaaacctctctaaaccgaaaactttgagagttgcccagaagagatccgttgctcctattttatacattacaaaaccgaagtacagacagatgaactattttaagaccttgaggctaattagggatgcacgtggcgtgaaaattttgggcgtctgaacttcctacaatagggcactactgattctgtattcctttgttgcctgaggcattcctttctctgggagaaaccaaagctgtacatatttatcttcaagagaaacttccactttgcctatgaagaaatagttagaattgttttctgtggttgcctcaagttagaggtgctaatatacatggaagttaaacaagaccacacatgtgcaaaactcttgatgaatcacgttattatactaaaccaacgttatactaaaccaacattagctagggttattagttcagattatagttatgcaggtcttccgtgttaagtctcatgtaaatatcttctggagcttacatgtgtagttatctatgttctaacctgtttcctaatgggtcatccagaaaacgtgggtgtggtctggctggaacagagtccctaggattgtgtcagagtcattgtcgtaagatatacctattcagaagttagttatctagatgttagagtctagagatggggcttcaatgagggatgtcaatggcagtatggggaaaagagaacagagttgaagactgaacagcctagggggagagcagaaagcaaaggcagctttataaataataaagatgttctgcaaaaattcctctgactgggttctgattggcttgggtagcctttttttttgagacagggttttgctgtgtctcccaagctagactgcagtggcatgatcctagctcactgcagcctcaacctcccaggctcaagtgatccttctacctttgtctcccaagtagctgtaccataggtgcacaccaccacacctggctaatttttacattatttgtagaggtgagggctccctacgttgcccaggctggtcctgaacccctgggctcaagtgatcctcccacctcagccttccaaagtgttggggttacaggcataagccaccgtgccccactgacattttactcttaatcctggcctgtatttaaagggtctgggtgaatgcagatagatagacagttactacgcgtaacagcttaccatgaattctaagtctcaacaaatccgtaatcatggtgtgtcatatgaagaacatgttctaactcttattgctgagcctgactttgaagtgtttgtttttttttttcttctttttttcttttgggaataagaaaaagcaacgttcttgactgcccggaaaaatactgtcttgtcagctggggatgcttggtgctgatgaggaatgtggtacagggtggggatagtcccttttaaagggctcagcatgtgcctgggcagttagcaaggattaaacaaaggaaagttggtaatattactgctagtatgagtatgagtaaaatgaacagtggaaagaaattaataataggaaattagtgatactatgtgtttaatatgcatagagcctctgtaatcttagcttctgaacaatagcactccccgctactcctctcttaatctggaggcccatgggtctccagtacccttatgcaccagctccatttgaggaaatgaaagtaggaatcacaatatttgccctggatctgcataactaggacaagcttttgaaagtggaagaggcccataaatgaacttctcaaaatgcacttgatacagcatcaaataggagtgacaggtccataaatcaagggattggggtcatttgattcaaatgtaaattgtcccctgcccagaaaactcattgccatgaaaccctgcacagaatccagagaacattttcttctggtctcttagaaattcaaaatacaagatctacatggtaccacagtttttgttgctgttactgttgttgttgtgtggtttttgttgttgttgtttttgttttgtcttttcacgcgggtgacgtttggagatgcccaaagactgatatcccaaaagtacctaatctacaacaacaaatatttatagaacctttatctcaatatttgctcattgaagtgggttaataaatgtctgttgaatgctctcaattggatggtgagtattttccattttagtttagctgtgaagcttcgctttccctcctatgccttttgttttcttgcctaaagaagcccatttcaagagtcggggatcttctctttctaatctcagcctgcccaacaatttgtagcatggtcttgctacagccgctttgctcccctgctactccatcttgtctgagatctgggttaactgggacttaactccttgtcaaagatgctgtgtgaaatgactaattaacaccagagaaggaaagagcattgtcattgacaaatagggcttttaataaccagcagttctcctggttattaaagttggctcttgagtctccccagacccatgcgaattgacaggaaggaggatattttagttccttctatgattgagttgcttgtcacttgagtttgtaatctcaggagtcactttatccatgttgtcccaggaatgaaaatggtgtgaatctaatttcagaagttgaggagaagtagaacaaggaggccatgattttctagtataactagacaattattttcagcaagttctccctcactgttgtggggtgagtgctcacatttgcctgccgctgagctatgttttaatgaggttggaagaagcaagaaggttgggaagattgatgttaattgcatttctaccatacactaagcagtgagcagatttaggatgactagtgtcctatagttctctttcaagatcagatcaagcttcctgaaccacatgagcctgtcttctctttacaccagcagcctcagtaactccctgttgggcaaccccatagagcaaacaccagaaaccccagaatttttctcttactaaagaagaccctccactgtcaacttaagctcacgttttcctatttctcaagccaaggtaggtctaggtattttttttttttttttttttttttttttttttgagacagtgtctcactctgtcacccaggctgcagtgcaggagtgtgatctcggctcactgcaaactccacctcctgggttcacagcattctcctgtctcagcctcccaagtagctgggactacaggtgcccgccaccacacctggctaatattttgtatttttagtagagaatgggtttcaccatgttagccaggatggtcttgatctcatgaccttgtgatctacccgccttagcctcccaaagtgctgggattacaggcgtgagccactgtcctcggcctcaaggtaggtctgggttttatgagatgtgacacttacagaatttgggagccctccgtaagaaaaacattcacactttgggaggccaaggctggcagattaattgaggtcaggagttcgagaccagcctggccaacatggggaaacccccatctctactaaaaatacaaaaattagccagctgtggtggcacacacctgttatcctagctacttgggaggctgaggcagaagaattgcttgagcctgggagacggaggttgcagtgagctgagatcatgccactgcactccaggctggccaaccgagtgagtctatctcaaaaaaaaaaaaaaaaaaaagagagattccaatgagattcaaaattactagtgcagagttgcagagttaggggtagcataaaaacacattgcctgaagtgatggtctctgaagcctaagcccagtcaccttctcattatccatttctgttcccagttgaaactttgcagtaataaagctgattttataaagtggtcaagagctgtatcccaaacttttccttgcatcttcagctcttcctgtctatgaacctctgcctctgttggcctagtctctcactatcctcttcttttattaagcaattaagtattgattaaaagccaagtctagtgagagctaaatgcatttgttgaaggttataggtcttgttatgggaaagcaggagtggaatgtagttgaattaacctagcctagaacagatttttctgtgtgttctatgaattagctgtatcagcatcaaccccctggaggggaggggccaacaggcatctgcgttaaatatgtacattcctaggtcccttccaaagtactgaatcaggatctctggggttgggatgtagggatttccactctttagaaacacccaccctcctttcttctgaagcatgtgaaagttgtaaaacaactgactaatctaagggccactgaaagctactcttaagatgcagcatttacttgagactcaaaggatgaatggcagctgccaagtgtattaatttcctaccccttccatagcaaattactgcaaacagagcggcttaaaataacagaaacttattctcttagttctggaagttggaagtcgtaaatcaaggtgtaggcaaggtggattccttctgagaactctaaggaaggatgtattagttgattctgatgctgctaataaagacatacctgaaactggaaaatttacaaagaaaaagaggttcagtggcctcacagttccacattgctggggagacctcacaatcatggtggaaggcaaaggaggtgcaaagacacgttttacatggcggcaggcaagagagtgtatgcagggcagcttcccttaataaaaccatcagctctcataagactaactgactatggtgagaacagcatggggaagacccacctctatgattcagttacctccaaccgggtccctcccatgacacatgggaattatgggagctacaatttaagacgagatttggctgggggcacagcataactgtagcaaaggatttgttctttgtttctctcctggctcctggtggctccccagcaatcctgggtgatccttagcttgtggctgcattactccaatctctgcctgcattgtcacacatacattttccttctatgtttgtctgtcttcacctaatcttcttgtaagggcaccagccattggatttagggcccactttaatccggtataatctcatcttaactaaatacatctgcaacaaataaggtcatattccagtgttcttggtagacatttttctttcccctgtttttttttttttttttttgagatggagttttgctcttgttgcccaggctggagtgcaatggcgcgatatcggctcaccacaacctccacctcccgggttcaaacgatttttctgcgtcagtctccggagtagctgggattacaggcatgcaccagcatgcccggctaactttgtatttttagtagagacggggtttctccatgttggtcaggctggtctcgaactcccgacttcaggtgatccacctgccctagcctcccaaagtgctgggattacaggcgtgagccaccatgcccagcctgacatttttcaaataaggtcatattctaaagttctaggtggacatttttaaaataatgtctcattacaaagtcctaggtggacatcttttttggcagggggacactcttcaacccaccatgccaagtgaaagtagtcagtgggggagaatggcagtgaaaatagatggatgaattcagaatgaatagaaaacttgaagaggtttggcaggagtgagccctgcttagttatcatccaggtttcactaacgcgccccttgccaacatgcagtagctctgagtcatgatctatcatattgccctgttttgtaattttgcattgtttgtttacttgtttaggaccatctctttaacctcgttagacttgaaatctctactcaattcaagcctgcacatccccagtgcctgaaaccatggctgttacatagtaggtcttggtgataatttgtcagttggataattttagctggagaaaaagaaacatgtatgtgtgtgtgtgtgtggggggggggggttgttttgttttgtttttgtttttgtttttttcacccatcctgcagaaaacactgcttctgtgacataaagagaacaccttcacagggtaaagtgttcttcccatgaggtctaagaggagtctcaaatgcgaggggcttgaagacatttgtgaagggacactatgaaacatatgagagcagtgagaagtggagagttgtctctctgactgcagtagaaggatggcgaaacatcagggagggagaagggcactccgggccagtattcaggaggagagccttgtggcagcttttctgggtgtggatttcagagcctgtcatcatagaaagaaaagaaggaactcaatctaaagtataaataaaaggagagacttggccgaatgcggtggctcatgcctgtaattccagcacttcgggagatggaggtgggtggatcacaaggtcaggggatcgagatcatcctggccaatgtggtgaaaccccatctgtaataaaaatacaaaaattagctgggcatggtgacatacgcctgtaatcccagctacttgggaggctgaggcaggagaattgcctgaaccagggagtcggaggttgcagtgagccgcaatcgcgccattgcactccagcctggcgacagagcaagactctgtctcaaaaaaaaaaaaaaaaaaaaaaggagaaacttacagaaagcaagttcaaaaaggagggactgtggatgataaattctataccactgtgaatgttaactcgtaaggatttgaagataacggcccccgactcccacttaggttacagatgaagatactatggcccagggatgctgcgtgagtgtcttaaggaggaaaagagcgttaatgtgacatctgggattccaggctcctttccagacctctcccctttttcacttttccgcctgatttaaagtgaaaagaagggtgttggcatctattaatcacctactgggcgccaggcatggatgctaatggttaggtcttcaggttgctgagtgggtgttgaggaggaggaaccagtgaccccagtagacattgaagaggctcaatgacagcaggaggattcaggggtctggtggggtggatggcatgcgacgggcccagcatcagcagtgagagggtaggagaatggtgagtttcagggcatgcatccacagcgtaggttggtaactaaaaggccagcccaggaagaggcctctgcacatgaaacatagaagtggctgcctccttcaatcactgttctgattagataagacctgggcttcgcttctgagtggtaaactcagaggcagctgggagtccctgagtgacaaggaggagactggcatgccaggtagggcaggctgagggttaaggctctggagggagaagaatcgtactcagaaaacatccagctttctgggggatgaggttgtgcagtctgggtgagggacatcggatttctatggaggctttttggatgggacctgatataatcatataatattgaattcagttctatgagcttttgctatgtacttattctgtgcaaattctgcaagggatgtcttgaacggatggttctttcttgcattgaatgcaaatagtaatttattttgattgagatagttttggaaatttcggagcagtgaaatccaagtatttcaacctggcaggttgaggcaataggtaagttaacttgggcgggctcacttttctatacattttgtgctcgggaccgtaatgcaagcccactgcaaatggcaacttcatgtatcaacttataagcagtggtggaggagatctcaaccctacactcattgctccctctggctcttagagactggcttctaaattcctggtgagttgcaaatattcttagattggactatgctaacattttgaaattaaacctacctgtctttaaatgagttgttggctgcccctccccccgccccgtattctctttgtgaagtagaggcttccagcacttttctgaaggagaaaacatttatttctcattttgtagaggcaagaccaaatttgtgtcagcttcagctgagaccactggccagccctccttctcacctcccagttccctaatctaatttatctcagtggggtttgtgggggttcatttaagcagcagaagctctgctataattgttgcatgtgccagcaacgatttgtaccatctgggtatggaatgaggtggggtaaggtggtttggaaagagaaaggaacagagagagacaaagagactagtacgaccaaagagaaagattcttattccatgaccaaagcaatatcattcaaaaatggctacaaagcaattggatactaaggaatgagaagcaatgtagttagagtaaaatgtcaaagtataatgaaacagaggaacatcactactttatgatccagccaagttacaggcaggtggcagctgtaaatacgcatataaataacaatatggatgaaatgtcagacctttcagctggcttggttaaagcactttagtaatagtctatttagggtaacaatgtagcttgacaatttccatgaaaaatacatcattggagaatgagtcagcccgcgttagcgtgtaggtgatgtgcattgtgctaagagcttagaacaacacacggtgcctggtgcatcccccacctgcctagaatggccagttgcttcatattccatgaggttacgttggttttctggcattgggttgcaaatgcttgtctttcccattacagaaagtaccttttctctcttatcagtaacacaggaaaataaataaatgatcaatgcctcagatccggggtcttacctgtggaaaggtgtggattgatatctttatttattcatgcatgaaatgtatcaggcacttgctgtggtgccaaggatctaaaaaagtgaacaaaaagatgtataggctcagacttcatgaattttaggctacactgcttaaaacctttaatgattccctattcttaggataaagtcataactcctgatcatggctgccaagaccatgtagattacttagagtctggtgaaagaagaaataactgaataaaatggtcacaaaaggtaaatgtaaaattgcagtagtgaggccaggcacagtggctcatgcccagaatcccagcattttgggaggtcgtggtgggtggatcacttgaggccaggagttagagaacagcctggccaacatggtgaaaaaccatctccactaaaaatacaaaaattagcagggcatggtggtgcatgcctgtaattgcagctactaggggggctgaggcaggagaatctcttgaacccgggaggtggaggttgcagtgagctgagatcgcaccactgcactccaggctggatgacagagagaggctttgtctcaaaaaaaaaaaaaaaaaaaattgcaatcatgatacatgctacattgtttggtagccaggatggcttcctgaaggaacaggtgctagacttgtgatcgaaggggtaggaggttaaacagagaggtatgagagtagcattccaggctgtgggattggcatgtatgaagatcctgtggtaggaaggacattagtgagtatgaggaatggaagagatcattgtcctcatagttgagctagggaggtggagagtggcccaagtcaggtggggataagtaggcaggagcctacatggtcttgccggccatgatcgggagttatgactttatcctaagaatagggattcattaaaggttttaagcattgtagccttaaaaggacgagcaggggctggtcctttagaaggcattgtgttcatagtgtatgacagtaagccaggagctctgagaaaacaaatggcactttgatgagcaggcactgtatatagtttcatacacatgttaaagcgtgtatagaggatgtgtaaaacatccacttcatgccaagcactggtcaaggtactgagggtgcctgagtgtaagacagcatccttgcctctgagcaatgcacagactaaggagatggaagtcatagaaaccactgactgaagtgttgggcaccctgatgagattatgaagcacggaggagcaccttcagccttaagatggcattcctagagttcatgtcctctaaacagagtcttcaccaaaggctagaagttgtcctcgcaaagaaggagtggaggaagtgttggtcttctggtagggggattaagaaagccatagccagctgggcacaatggctcatgcctgaaatctcagcagtttgggaggccaagacgggtggattgcctgaggtcaggagttccagaccagcctcaccaacatggtgaaaccccgtctctactaaaaatacaaaaattagctgagtgtggtggcccatgcctgtaatcccagctactcaggaggctaaggcaggagaatcgcttgaactcaggaggctgaggtcccagtgagccgaaatcatgccacggcactccagcctgggcaggagggcgagactccgtcccccaccaacccccccaaaaaaagtcatagccaatgtcttcccaggaagtcaaggaagcaaggaagatgcccaggatcggtagacagaatgctggtgaagtagatgggggtgggccctcttgaccagtgtcttgccagattttcttaaaactgtaccatatcaaaggcagattgtctcccaagttatcaagtcaaactcgtgttctagccctgcagctcaccctgttttccatcatatgtgtgttataggctattatagatatgatcaagttgagtttataaggtccagaattcccatgcatgtgagaaagtgtaaactgaagccacctgttgggttatgtcccctaccttggtgcatgaaggaaaactacacaaagatgtgtggtatcaactcatggagacaagactctatctacaggatagcaaacatttggatagaacttgagaaggaatatggtggaggaatgagtttttatctaagccaagatccaaccatctctcgatgtatacattttctaccatgaacatgtgcaattgcccatctgtgttttctttcccttttgagattcctcttgaccttctgggtcctggggaagtcctcaggacaaggatggacctaggcgagttacatcaggtaccacagtgttaaagagtgattatcacagtttgctcctcacactttatatttggccagccctgggccaaccccttttcccagccctgggccatacccttttccaataataaagcccattttttatgattttgctcatgggttcatttattgatttgttcaaacacaatagggcactacctatgtgtcaggtaccatgctaggcacaacggattcgatagcaaaccagaccattgtattttctgccatcttgaagcctcagattgcatctggaatgaatattattagaagcagctagattttgattggaaattctctcttctgaatcctttagcctaccaaatgctttggttctagctaaataagtggtggttttatttcctttgtaatacctgaatatgtattccttggatacatcaccctccctatattgagaagtttcacgtttcagcagcctcattctttctcatccttgtggaatgcatgtgcatgtatgtctctgtgcacatgcatgataggtttctatccagccttactctccatgcaagaatataacagctcccagagttgtttgcaagaaaatattaaatatttacatagatatggacattttgtggggataatataagaaatcttattcacacttggccgggcaccgtggctcatgcctgtaatcctagcacattgagaggccgaggagggcagatttctttagttcaagagttcgagaccagcctaggcaacgtggtgaaatcccatctctactgaaatacaaaaaaaaaaattagccaggcgtggttgtagtcccagctactcaggaggctgaggtgggagaattgcttgacctcaggaggtagaggttgcaatgagccgagattgtgccattgcactccagcctgggaacagaatgagactccatctcaaaaaaaaaaaaaaaagaaaaaaaagaaaaaaaaaactgattcacatttcaatcaatgatagtcactgacattgaaacttactatgagccactgtgatgtctaagattcattctctgtttttattcttacagcacccctattaggtaaatattattaatgtcccctgtttggaaatgtcaagttcaatcccttttattaagggcagggccagctttaagggcacattccctgcatggtcatgcagggccccaggctttgaagagccccgcatgtggtcttatgctatagctggaattcttaatgatttttgaacaagcgttcctacattgcccttttgcactgcccccagaaattatgtggccaatcctgattaaggggcagggcagggctctgtggagggttgatgtacccacagcatccatccctttaacagttcctccacgttaggaccctcctctcaacattgcctatcctagagggacccccccttatacaaatacagaaggtacctggttcattcttcaagctgtgtgtggattctcattgtgaagtgaatcaccttttaatgtatagtcacccaagtacatctgctatgttgatatatcacttgttttatgggccgggattaattccaaagtaaacactaagtactcagctgaaaagctgtaaacacaagacaggacgtgcctctccaactcccagcattgtttgccaaggttgcaagtccctctatgctttatcctgtttggcgtaacaaaatcttcgtgtaatttggtctcagcagtcatttcaaattgattttaagagttgcaggcaagggggtattgtggttgggagaacacaccttcacgtgcattttgcctccctttcttgcctcagcatcacccaacggtcttcctgggatgttcaccttcctgagcttgatgggtgcccgtagaatcgccacctatggctgtgctctgtgcaagcaggcctgcagtggtagcaattgcaggaggcagtctactccaagccttctattcaagccctgagccctggagcagggctgtatcagcttggaggaaagggcatattttgggtattcttccactcggaaggtgtactttttttctttttttttttgaaacggagtttcgctcttgttgcccaggctgagtgcaatggcgcgatcccggctcactgcaacctctgcctcctggatccaagcaattctgcctcagcctcccaagtagctgggattgcaggcacgcaccaccacgcccggctaattttgtatttttagtagagacggggtttctccgtgttggtcaggctggtctcgaactcctgacctcaggagatccgcctgcctcagcctcccaaagtgctaggattacaggtgtgagccaccgcgcctggccttgggtatgcatttttatcactcatacagcgggtccatgaatgcaagcagtggctccagatatccaggaggtcacacagttgactgttgtgtcatggaatagcaaacactatcttccgatctgtgtcctgggtgctgggcctcctgacattggtgacccagttctgaattccagaatgacagttttaacattagattttgttagtttgtccatcttatttttatggcattagtgttgcgtggattgaaaatcacacgtacacggacacatctatttacgtataaatatgccttgccttgcattcttctatcttctttacttaagtggtgagatgtttgggtttcttcatgcagtgactttggggaagtccctggagctctttgatgctctgttccttcttcttcaagctgtatttgattgtgaatgttccttgtgaagtgttttaaatcacaggtatcaaatcccctttgcttggtttgagggatttgcctctgttgccctcatattttcagcctaagagggccctccccattcctcccagggacatctaaaaacgtttatcttcttgtgtgcagtctggaaggttcttcttacgagcatctagcctcacaccaagcagccaaagttgtcttaaaaaaaaaatagcatctttgatatgatccacttggccacagcagcttcatcaccccctccccaatactctaatgtccagttaacgtatattctcagtccctccaacaagcatgatctttgtgccccaggacatttgcacatgctgtttcctgaaaggctacattccacagttcctaccctggtgcctgcttggttggtatattcagccttgctcagcttggacatctcctctttaaggacatacttcctgattcaccttccaaatcagaacaaagcttcctgttctttgccgtattccagtaagttgccaactcactggacattttctcatggtgtgcaccacacgtctatactgccagagccatatgcattacaaagacagggaccttgtctctctggagccctaagtgtgtccttaaggtttgcaaaggaccagcgtctaatgaccatgtgaatgcaggaattatgtgattgtgtgtctctctgccttcccctaagtctgccgtgtccctgggccagtccactttgtgcccagatgctcactttcccatgctgtcctggagcatgtgctcctcaaatctctccttgttcatgttctgagaaagaaaatagctcatgctaagctttccaagtagacagaaaatgagccatgcctctctagctgctgttttttaaaattttattttactgttgcttattttttgtcattgttaaaggaaaaaaacattgacttctctgacctacttccctagcattctttccctttcctcttggcccctttgcaagcccttgaatatcataggaatatattccccttaaggtctttttgaccactatgtcttttgtctagaatgcaatttttttcaagttcttacctagttcactccctctcctccttctcagcttagctcattaccttttcagataagacctccttgactcctccattaaaatcagaccccctcttcactcccacacaccctgtgttcctttcctagctgacttttgccatattgcttatcaccatttgacatactatgtattttatgtttcatttgtgtctgtctttctgcactagcatgtaagctccaaccgggtagatattttagcatgttttgtttgttgctatatccttgcagtgcctttcacaaagtaggtactcattgaatatttgttgaatgattaaacctatgaatggatgggtgaatggatggatgaatgatggatggatggatgaatgcaatagatggatgggtgagtggatggatggatgatgggcagatgaatggatgtaacagttgggtgggtgagtggatggatgaatgacgggtagatgtatggactgaataggtgggtgggtggatggatgggcaaaagaaagaatttggccttgggttttaacatcagtagtaatctctactttctagacattgagttttaggatggataccaacaattattatgttttgagacacactttctggagaaagtccagagatccttttaactcacttggcatgggcaattgttaccttgcacttgccattttgtacaaaagtatgtttggttccgtgccttccttccttctctggcaaattgaaaattatgatggaaataagaatttccaaaaacctgtggaggtgaaagaagacataaaaacaaagccacagattattgtacatttcctgttgccagattaaagccttgcatccactgtgtggaacaatttaaaatttcatctgttaattggaaaagttacagatattgcagccattcaccttatattgcggggggacagttctagtttaaaatattctactatgctgtgtctgtaaatcacagaaattacctagaaattgcaccattttggcatttcaaaatattgcttgcacctggaaatagcaccagaaaatctttcccagatgcagtttgatttggaaaatataataaatgtagttttgggatttaacttttattctggtccatcttcttttagatgcttacgggccaccatacatacacatttattactacttttaccctacccacttggtaaaagttttgtattttatttttttaactgacaacttgttaaagacagaaattatgttttaatagtttattggttggatacttttagcaacaagtaattgaaaatggaaataaaattagtttaaacaagagaaacaggtatgatttcacaagaatgttagcaagaattcaagggatgaggcagacttagggttagataattcagttaattcatcaattcgaaaatatcattaaggtttcaggtttttgcaatatttctcctatgctagtctgattgtatttgcttatcctcttaggctgtcattcctcctgtttctattatagctgccattgctccagacatcatgtggaaactgcaacacccagaagaagaacaaaaaatatccctgtttaattttcctttttaggaaaatctccctagccagcccacgtatctcttccacagacttctggtatttcattggccagattatatgatttgccttaatcatttagcaaaatatatatatatatatatatgtgtgtgtgtgtgtgtgtgtgtgtgtgtatatacatatgtgtgtgtatatatgtatgtgtgtatatacatatctaatatatatctaattatgtatgccttatatataatatatacatatatatatctaatatacatatatattagaggggaacaacacacagtggggtctaccagagggtggaaggtaggaggatggaaaggatcaagaaaaaataactatgggtactaggcttaatatctgagtgatgaaataatctgcacaacaaaccaccatgacacacgtttacctgtgtaacaatcctgcacatgtacccttgaacttaaaaaattttaaacaatgagatatctaaatgaatgaatgaatagataaataaataaaagctattgtgttgaagaaaaagaaattattaggttcccaaaactgcatttccagcctccctcccaaaatttctgatttgatatgtcttgggcagagtctgatattctgcaagttttacaagttccctagtgatatgaaaatggctggttcttggaccacattttgagacccatcaacatggaataatcaagattgatctccttgacattgtggagaagctcgactcccttgaaggacaaggaagccatgtagtgagtgaggtctttaggtttctgttagccagataattatcttttgtttagttagctaagaataactgatacagctgacaacttatggcaataacattatatttcacgtggttgataagaattgactgaggatgaaaaaacaaaggcaaaacaatttttttttttttgagacagtctcaccctgtccccaggctggagtgcagtggcactatctcggctcactgcaacctccacctcccaggttcaagcgattctcctgcctcagcctcccaagtagctgggattacagatatgtgccaccacacccggctaatttttgtatttttagtgaagatggggtttcaccatgttggccaggatggtgtccatctgttgacctcgtgatccgctcaccttagcctcccaaagtgctgggattacaggcatgagtcactgtgcccggccaaagtaatttttaaataaaattttatagaataattgaggatgaatgtagaatttaagtctgagttgtggttaagtgtatttcagataccctccaagaacttagaattgacattcagctctacgcagtattccaggtcatttgtgtgtctgtttttgcatttccaaaagccgtacgttttcttggaattcataacaaccccattcactgggttgagcaaatattactggaagatgatatgataatccacatccagcaggagaaagctggggctcacagaggttaagagtttcccagccctcggaggtagtgagtgttggcattagagcttacagcagcatcctctcatatctcttagcgacttctgggatgtgagggggcacaggcattttgcagtgactgtgagagccctcagtatcagaccatccttggtacccactccagagagacttctaccctcccatttgttcttgtcttttaatttttcagcctcctgtgaggtgaacggatgtcaaggaggattaaagaatgaaacatgcttattttctctccttacgtgcctgaggacaggccagtgagctgtggggacaatagaactgtgaaaatcttctcctggggttcttttcttggtatttggcctgacataccagggaagctactacctctgtgaagttgtggagggctcctgcccagccttcggagggaaacagcgggtcacaaagagagttttccatatttacatgattgcatttgttgctgttttaatggctgctgtaacaaatcaccacaaatttaacagagtaaaagaaacacccggggtcaggagttcaaaactagcctggccaatatggtgaaacctcatctctactaaaaacacaaaaatttgcctggtatgatggtgggctcctttaatcccagctactcagggggctgaggagaatcacttaaacccaggaggcagagattgcagtgagccaagatcgtgccattgcacgccagcctgggcaacacagcaaaactctgtttcaaaacaaaaacaaaacaaacaaaaaaacccgccatgtattatctcacagctctgtgggttagaagtgtaacttcggcatgactcaactgggtcctctgtttagagattcacaagacggaaaggcagaagttagcagggctttgtttcttactaggggttgtgagaatgaatccacttccaagctcactcagctttgcctggttcagtccctggcagtggtgagactgaggccctcaaagctttgctggctgtcagcagggagatagccctggccttcagaagctgcccgtattccttctcctgctgtccagcgacagctactcgagtctctttttgctttgaatctctccatgtttctcttttgccacatcactctgactctagttggagaaagttgtccaccttgaaaggctcattccatgagactgggcccacccaggtagttcagctcttctcctgatctcaagatctgtaacttgaattacatctgcaaagtccttgtcttagcctgcttgggctgccataactaaatgccaaaaactggttggcttatcaacaacagaaattcattgctcacagttctagatgctggcaagtccaagatcagggtagagtgaatgtcaggtaagggcccactttttggcttatagaagattccctcttgctatgccctcagatggtagaagggacttgcaggctctctggagtgtcttttaaaagggcatgaatctagccaggcatgctggctcacccctgtaatcccagcactttgggaggccatggtgtgtggatcacttgaagtcaggagttcaagaccagcatgggcaacatggtgtaaccacatttctactaaaaatacaaaaattagctgggtgtgattgtgggtgcctgtaatctccgatactcgggaggctgacacaggataatcacttgaacccgggacgtaggggttgcagtgagccaagattgcgtcactgcgttgcagcctgggcgacagagtgagacttggtctcaaaaaaacaaaaaaaggtacaaatccccatcaacagagtcctacccttatgatgtaatcacctccttaaggccccgtcttctaataccatcaccttggtgttaagatttcaccatatgaattaggggtgagaggacttaaacattcaaaccatagcagtcacctttgccatgtaaggtaacatatttatagattccagagattagggcatgggaatatttggggggccgttctgcctactacaatgatctcatcacaatgataaatgttagcagacattgctctgataacgacaacagctgctattttttaaatgtcactctataccagccactgagatagatacttcaaattgattggatcatttaatccccatcacagaagagcaaagtagagactattattcatctcattttacatgtatattttttaaaaagccaagacattgaatgctttggtgtcttgccctgggtgactcagaaggaaagtgtgaagctgagaccctagccaggaggtctgactccaaagccttggctgctaatctttttgcataacccatgtcttccttgtatctatgccatctttatgatctgcttacttgtacattgccactcccttctggtgctcaatggctctgatttccttaagatagggttacattattcacccattacagaccactccaagacatgtgttttgctcaatgattgtgtgtgcacctgtgcacctatgcacatgtatataatggtggacagtttagccattggagctccccagtaggagccagtgacattagtcacatccagaaacacagtaaaatgatcaccatcgcaggtgaacgctgactcttttccaaaggaatatcgcagaagctggtaaaacagtcgcatccaagatcaaacaagacatcggccactggaggatggtggtcacttctgcaaaatggatcaggaggatttagaaagtcattatggcagaatgggatttggggttgccaaggcctattggacctcttttctagtaatttcacccctttcagggacatctacaagctattgttaaaaatccctgagtgtttggctctccatttcgtcttctgttaaatgaggcaatatctacaatgtcctctctaggcttttaattggatcccccctccccgcccgaaatacttcttgtattgtctgtcttttttttttttttttttttttttttgagacagagtcttgctctgtcgcccaggctggagtgcagtcgcgtgatctcggctcacttcaagctccgcctcccaggttcacgccattctcctgcctcagcctcccgagtagctgggactgcaggcgcccgccaccacgcctggctaatttttttgtatttttagtagagacggggtttcaccgtgttagccaggatggtctccatttcttgacctcgtgatcagtccacctcggcctcccaaagtgctgcgattacagggatgagccaccgagcccagctattgtctctcttctatcccttggaattgccttaagctagcatgttacctcttccagggcatggcacgcctcctgctgtctcttacccggtgtctgctaagctcatccttagaaccccaagttattttctacgtcaggggctttgcatattttactttttccacctagaatcctccttttgacattctttacaaacctagctcaatcttgtcagcaaactctcagctcacatgtcacttccttagaggatcctctgataagcccaattgaagtacacactcattacaacttgtaattaattgattttctggcctgccttctcgtgttgggtgggatcctctacaaatctgtaggcgccataagggcggagaccttggctgcttcatttgttcttgtgtctcagtgcctcagctgtacatgtaagtgaaataggtgtttgtggaatgacttgggagcagcaccgtcatctctactttcctataaggagtcttgtgcatggcctagcacatattctgtccccaagtccatggaaagcactgcctgccaggctatttgtgtcatttcaggaaaataagacaaagttaatagtggtggtaatacttcactagcttccaagatttgtcaggaatatgctgtctgcttttctaaagcccactctttactggagtcttagagtataccctggggatcctttgcttctgggtcaataggagcactcattaaatgcagatttgtgggtccctcttcaagccgatgaatcagaatcactaatgctgaaccccaggaatatgcatttataacaggcaacccaggtaattcttgtctacaccgaagtgctggaataactgatgtcgagtgtttgatattaactgttatctgttcatacatacatttttttgccccaaagcatctcatggtgcttctctaagcaattttgttgcttaaaagaatgacagactggataactggaagcagacatctctctaacagatctcatcgttccagttttaagtagaaagtgcatcatctgtgttttctgatcctgagcttaggttggagtaaacctgctcagagactttctccaggattagctagccctggggcacaggggaaaagatgcctggttttaggcaacagtgaacaccatctgggtcagcaataggattcaactgccaaaaagctagcacagttgtaatttgcatctaataaaaggagatttatagaacaacaatccttacagctctactctgaagtattgtacgtacagttaatgtcattgctgtttatggttttaccagacctatactatttaatagagataataaaggttaagttaagtgaatgcttatttcatgccaagctagcgcttctaactgcattatctcattaaattcataccacttcccagtgaggcaggtactcatgtttccattttaaggataagaaaagaggggcttagtagctcggttttaaaaagtcaccccaggtcctagggtggttaatggagcccagatgtgaagtttgcttcaactccacgatgtcctgccttcatctgagcctccccaggaagacagggctcggaatattcaggaaatgtcattgatctggatcccagctctgcactcactagctgtgtgtccttagcaaggcatgttactttctgaatctcagtgtccacatctgtaaaatggcaacagtgacgcttacctgcatgaattattcagtgatgatgcccaggtatccacatcattcctaggtgtgtgcaatcaagggagttatttgattaaacaagctgctctgattatatacacaatgctaggttggggacaccatacttccaaaggaataaggacaaattagagcaggaagagaccaaaatggtagaatgaccaggaatggtctctatgaatttgaggattttcagccacaggagagactgatttaatcaacacatatttacagagcacccactctgctccagggccctgtgttaggcacctggaaaacagaggcgaaccaaacagatatgtctcttatctctatgtagcttcagaatatttagcaaacactgcatataaatatgtacatattttaaattgcgatatgaaggataagtaacacaagcatctaacagaggtaactgatagagtatcttctagagaggaaatcagacttctttgcatccctatgtgctaatataagaattctgagttaagcataatgacacggagaactttccaatgagtctcctaggcgacctctcaatagggaacaagtgctaaagacagacagctgctgggtatggctgttgcagggggtctcatacataccaagtcttatagacttggcagtctttaaggtcaaccagattttatctgtctgccttctagggttttcttgaagacgtgcactttgaacaaagaggacattgggatgtaacaaccacagtggttgaaaaaccccaaatgcccagagagaacattcaacccttagaatgttagagagggcagtataatataatgggtgagaacatggattttggaatgaaataaacgtgggttcaaatcccagctctgtcatttagtagctgtgggactttgggcagataattcaactgtaaaattgtggtatgataataagagtgaccttgctagggtgtctgaggattaaataagattgtatacctacagaaaagtggggatataaactcggatctgtctactgggacaccccttatcttcccatggtgcacatgcaacgtcttccccacttccacttcatctctttggaaattacttttgccctgcctgacttcagtctttacagagtccttctttgtttcctgagagctcaatctatagccaaagtaatgagcctgatctgattcagcccaagaactctggtcattgaacttgacttggtatgtccatcatttgtacattttggataacaggttattgctaagagggaaaacctttagctgaatccaatacattcactgcaagtgaagcagaaggaaaatgcctaattccgacttgttagccgctgaacttctgagaacagaatcagcttagctgcttgcaaataagcgagcatcacagaacttggttgagctggcaagaaggtaacaagctgtgtgtgaaaaccctggcattaaatctccacagtaaagttgcttggtacacaggatcaaaagagctgaaaagggtaaggagacaatgagcaagctcctttctgcatacccgcccgacctttaccattgggaacaccccaaagagtgtatgctctggcaccttatcaaaaaataagactgtgctttagattataattaaaacaataaattcttctcccctgcgtgtatcccgattagattgttgacactgtgtcaagctgttagggagataaactcacgctgctacttgcactcaacatgccgcttatttttgagtcactcggagggtgtttttttttttttttttcctggtgacaacttggaaataacccattggagtttccttccttctatttctctatgaagttattaacactgatacacatggaacttcggaaatgggacagcttccatcttggtgttgatgtaggtcccagaatgagccttttaggaatctggggaacttatgtgttggtgaaaatgccagaggacacatgcatgcataggatgctttaaagtcttctgaagataggttgtttaaactgtggcaggaggtctggggtcagcctctgagcagggatttaggagattgtctggctcctcacccttgtttctccaagcatcaagagcaaactctttcttttgggtggatgccactgatggctgaccaagagtcaagggtggggaggttgcgaggatcacagggtcccgtccaaatgacctgattcaggaatttcgggtcttgagccatggtcccagcaaggctgagtaattttttttttttgaggcagagtctcattctgtcacccaggctggagtgcagtgttgccatctcggctcgctgcaagctccaccgcccaggttcacaccattttcctgcctcagcctcctgagtagctggggctacaggtgcccagcaccatgcccggctaatttttttgaatttttagtagagacggggtttgaccgtgttagccaggatggtctcaatctcctgacctcatgatctacccgacttggcctcccaaaatgctgggattacaagcgtgagccacctaattttttttttaattcttagtagagacagggtttcaccatgtcggtcaggctggtctcgaacccctgacctcatgatctgcccgcctcggcctcccaaagtgctgggattataggcgtgagccaccgcacctggccccagcctgagtgatttttaattcctaaacctatgaggctatgtttgtctcatcttcagacctttgcctatgaggttttgtcacttgcaatgaccttacaatggcacgcttttcttgggccacctcagctcatccttcatatctcagcttgcatgtggcatcctccataaagctttttaaaataatgcatattttattttgaaatagttttagatttattgaaaagttgtgatatagccctgagttcccatgcacccacactccgtttcctctcttcttaatgtctcacatcattatggtacatttgtcacaatgaataaaccacattgaacatggaaatttccccttttaaatatttttagtgtacaattcagtagcattaagtatatttatattgttgtgcaattactaccattgatctccagaactttttcatcttgtgaaactgaaattctgtccccattaaacactaatttcatccgtcctgctcgcagcccctggctactttctactttctgtctctctgagtttgactacgctaagtacctcatataaatggaatcatacattatttgtctttttgtgactggcttatttctcttagcataacgtcttcaaggtacattgatgtgttcaaggtgctacagcatgggtcagttttttttttttttcacttttaacattgcataatattccattgtgtgtatataacacatgttatctgttcatatgtcaatggacatttaggttgtttacactttttgattagtgcaaataatgttgctcagaaagcctttcttaatctgactgtataccccaggtgcacccttgggtcatctctatcatagaacttatctcacagagtataagagctgatttctgtgtctgcctctcacactagacttccacatccttagtgcaggtgccctgccagtaagttgttcaccattgtttccctatgatgtagaagagttcctggttcatgtgacatgctcagcaaatatttgaaatgagtgattgtaggaggaatgaatggatagttggttggttggatggatggatagagggatggttggatgaatgagtgggtgggtggatgagtggatggatggatggatggatagttgaatggatggaagaatggttggatggatggagggatggttgggtagatgagtgggtggatgggtgagtggtaggcagatgaggtgatggatggatggatggatgggcggatggatggatggatggttggatggttaggtgggtgaatgagtgagtggatagacggatgagtgtacgtatgtatgtatggttagatggaagagtggatgaatatatagatggggggaaagatgaatatatccagaggatgagcccaagcagattcctcaaggagtagaatttgatttatgccattgatctcactggggtggtcatgtgatgataaacaagagttcagggcaaagaaaacacaccaggttaaagtagcattgagcatagaaagagtagatctcagggcgggatgggggagtataatttgctttactttttttttttaacctaaaaatatttttatttagtgtttcagtaaattaaatcaatgacagtcttttccatgatcctactgccaagatagattttattgaacttttaagtataaaaatagtgcacagacagataataataggagaaaataaggaataaaatgaaaatgttcttcccaaccagtctctctataaagataaccacagtaactacgtcttgtttatttgccattattcttggggggattttctatgatttgtgaatatgtgtctgccatgctcttttttaacgagtgcctgtttgttcattgcataaagttaacaccacttaactgttcctcactgagggggacatttagctttaggctatttccaacagaactgcaatctctttaaaataccttgtgagtatatccataaggtaaattatttgaaggaaaactgctgggctaattttttttaatgtacatacacttatacattttggtagatgttcccagatgcccttccccaaagtttgcaccacctgatgttaccatgactcatttttattgctgtcagtcatttagtgtgggtgaggcacccttgttaaaagacataaggttggagcacatagtccagtttacttctgaacatcagtaggacatttcaaaaaaaatgagtcctgctattccctaatttataataaattctgagacgggggtggagatggcttctttacccatgagctatgcacattagatcaaaaaatgggggagaatccagagatgttgaactcaagcgtgatttgaaattctgtccattttcttgccctcagtggatgtttttaaagtagaagagacaggaaaggttaagactttcagtctctttcccttaagagtgatgtgtgattctctactgtctgggagctccagggcctgacccacagattggctgtcactaatgctgggaagaggtgtcactagtttagcaacccttcattctatgccatttcctgcttccatgggtcaaatgtcagcaccgttcaacacgggctgaagaagctgacaaaaaaggtgcttgggactggatctttcacagagtacaaatgaggtagtagtggaacaattggtgaacacactttagtatatatttgacacaatttagctgctatgcctggcatctctccttcagcatatcctgcctggtagttatcattaaaaaatcgaagaatatataacatgtttataatttcttctttttatccatagttcaaagggagaagcatagcttctcttttaagagatagaaagatatagacatagacttagatgtatgtcattattctcctttaggataaaaggtggctagggctttataaaatttcagtgtaaatacatggagtaccatgtatttaccaaattaccaaatagtaatttggaggaggggatcttcgtcaacaacataaactttccattaacagtaataccctcttgcagtgtcacacacgagtctttataacttaactcatttggaagtcaattctttccagtgtggctgaactataagtctgaaaccagtgttatgaaacttgcaaagaaaagattaagttattctgatatgaaaatctttattttagaatgcgatatttatgcagtacacagtgcaaatatacaacatagcgtttactgtgaaacgactccttccacttctgtccccagcaattcagttcttctcctccgagactgcactgtagctatttttgagcattaatccagaggcagtcaattaataaacaagcatattcacacaaatagtagcatgtgatcatatgacaggaaaaccaagttcccagactgtggcaaaattgtttcactaaggataaaagttacagaaagtatacttgtttggcagagtttattagataatattattagataaaagtgttagcaggataggatgaattcatggaaatgtgggatttctcttatgtatgtattgctttattaagagcaaacgcaatattaatatcacaggtttagacgtctgaaaaacatacagggatttggctatgcctttcataggctgtgtgatgtcagcaagctctccattcctctcaacctcacagtccttatattcaaaaagcagaagaatgtctctgtccaagggttgatacaaacgatgaatagcattagattaaaaggatctccgctaggtgcagtggctcatgcctgtaatctcagccctttgggaggctgaggtgggtgaattgctttaagcccaggagtttgagaccagcctgggagcatggcaaaacgccatttctactaaaaacacaaaaactagctgggcatggtggcgggtgcctgtaatcccagctactcaggaggctgaggcatgagaattgcttgaactcaggaggcggaggttgtagtgagccaagatcacaccactgcactagaacctgggtgacagagagagacttggtctctcatatatacatatatatatatttatatataatgttatatatacatagtatataatatatattttatacattatgtattcaaggtcctttatacataatatatatgtatatatgtttatatatgtacatatgtattatatatataatatatataaaggaccttgactatagtagtatttagcgaaagcagtttgcttgttttcctctttacctgctacccatattatgagttacaggagcagctcctcaaacagtaatatcttgttgtgctttatatggctaaatttaatggttaaaaaagaaagagagagaatgtggtggaatcaaagagtagtttcttctgatttactagtatgctccctccccaacctccacttcttggctgtgttcatacatgaatggagtgtgtagacattcattctcatctactaattgctttcttcatagacaattctagtgattacagggacattgattctaggggatgtgccaaattacctaagtgccatccagctctcaaactttttgtaacctccctcaagcaccttttgaactctacctattaactggcaagcaatcgagacgttatttaaaaatcaatattatcttttcattaaaaacagccccccggccgggcatggtggctcacgcctgtggtcccagcactttgggaggctgaggagggcggatcacgaggtcaggagtttgagaccagtctggccaatacggtgaaactctgtctctactaaaaatacaaaaattagccaggcatggtggcgcatgcctgtagttccagctactcagggggctgaggcagcagagtcgcttgaacatgggaggcggaagttgcagtgagccgagatcgcgccattgcactccagcctgggtgacagggcgagactccatctcatgaaaaacagaaaacaaacaaacaaaaagcagccccccatctctctcagctgttatgctgctgagtaaatggcctcttctcacctttttgtgttccccagtgcacttcaccttcactgtgaaggtcatgtattcatgcttctaatgttttacaattaaggataacatctccactttggtgaatttaatgagacttggcagtgaccccagtgacctggtgaacagccaactatttaggttggtgcaaaagcaattacggtttttgcctttttatttttaaaatggcaaaattaaagtggcaggaccgcaattacttttgcaccaagctaatattaaggagcctggctctaaagtcggactggctttcatcccttattacttgtgtaactctgggtaagttacgaatatgctttccctttccagttcttaatttttcttctgtaaaatgggcataatcgtagaactggacttctagaatgtctggtgaggattagatgagtataaagcgttcaccatgagggttctaatcatttagccacagtaagcattctttgtgtgttggctgttactgtgaatgccatttagttacctgaatccattcatccacttcgtctcatatattttccaatatttatggagtgcctgtgttggtcaaagcaccaatgcagagccgccatctttccctttgatttttgaatgtcccaggatggtactctagatggttccacacaatccagctgttgataacaaagacaggttgttcaccaaatcagagagtctttgagagttcagaagagtttaaaagagacagatgggtgcctctttcatggccccgagcttttctgtagaggttgtctttcacgtggagacatctctgttccttttattttctgttgactcatagcaactcgggagggagattattgaagaacaaaagggaggagtgtgtagttctgttttcaacactccttcaaagggaggagtgtgcagctaccgattaatagatttgaaggatgggcattcttttttttttttttttttctttctagatggagtctcgctctgtcacccaggctggagtgcagtggcgcgatctcggctcactgcaacttctgcctcccgggttcaagcaattctcctgcgtcagcctcctgagtagctgggactgcaggcgcatgccaccacacctggctaactttttgtatttttagtagagacggcgtttcaccgtgttaggcatgatagtcttgatctcctgacctcgtgatcacccaccttggcctcccaaagtgctgggattacaggtgtgagccacacacccagctaggatgggcattcttgtagagagagatagctaagatcatgtttctggcatccaagctcttggttataactctgggtttgctgcttgccacatgaatggcctcggacaagttattgaacctatctgggcctcagattccccatatgagaatttgattgtgttaaagtattagggtagctaacagagcacctgaaagttattaatttgaatatatgttggtaacagattataaagttgtgaggtagcatttatttggtgcttactatgtcccaggaagtggggtaagaagttcacatcatgtctggcagtgtagtaacctgcagaagagcca[131 bp omitted]ctcccacctcagcatcctgagtagctgggaccactagcacacatcaccacacccagcaaatttttgtagtttttgtagatactagagatgctgttttgccatgttgcccaggctggtcttgaactgctgggctcaaatgatcctcccacctaggcctcccaaagtgctgaaattacaggcatgagccataacttctggcctagtcagaatatttgtttgaattcttaccctcacaattacaagctgtggccttaatccctttccttaatgctttcttgtcttcagatcctccatctggaatacgtgaagatttaatgagatgatatctatataacacgctttgaaaaatgcctgacacgtaaagatcacttaataaatgttggttattcttactgtattaaacatcccaattattagatggtataacttgcccaggttcacacaactcagaagatacaagaggaaaacttgagttggttttgtcagctcttctgcagacgtagggggctaaatgagtaacattctgaaatgaagtcttcggcatctccaagggataaggatgcctggaaatttcacctttggggcacattctataaactgtacaaaattaaatccctcacttcatttccccagaaagacccctctgaagcattgctctgtatccttgcaaatctgtaccacgagacaaggggatgtcagtaggatttggtctccccacaaaatccctgcaaagatgtatgaggctgcatataaattgcattgaatgggctaacattgcttttatgctgaatatcggcaaaaagtatgaaatggagattacattttcaattctggctttttcccccaaagctttaccaagctgccctcatcctcacccctccatcatagtgcaattgcattggtgtggagtcctagctctcctttccttgctgggaagtgtacctaacacttgctgtcaggctggaaccgtgggtaacatgttccttaacagcaagtttctttattttccttcccccacatctctgtcctttttttctcactactttttgttgttaagacctgtcacacatgagaatcacaaaaccaactacaaataaatggcattcttgtggatgctaaaatcggtatatctgtctcttgggttgttcagggtagaaataagacatcgatgcaaatatggttcatccaccggcaatgagacacaggcttattatttcttcctgaaatacatatattcatatcatctatttcagtttgtatctccaaacagccctaaatcattgtgaggacctgggctccagtttgggtctatgaaaagagggtttacccgtggggggtcggggggtggttgtgcatctggttttacatcagcattaattccgatatttcaacagccccttcctgcccacattccttgcctctcccttctgccccctgaatattattgcctggctgactccccaaagagaaaatgtactaagcgaacttgacagattccggctggctccatatggcatggcctgagtttcgtgttcctgggacccccaagctgctctcaccttattacgatggtagtaactacatgcaagtcaagtccactgcattggttttaattccttgggccctggggactagcctcagacttcaaggtggcattggatgcaacatcatccactgcaaatatgacctttcccttctcttcccataaccacacagctggggggaaggtaggtggaaaatagaccctgagtctaggaaaatcttcgaaaaatgcagagataatatcagagggctttgctagggctggcagcagagtctaacaaagacatcttaaagcatcttgttgtttattgcttgatctgaacctttgcactcccacacataattgagactttgactttgattcataagtatataatttgaattcctccttctctctacactgttttaaagccatggagaaaattaactccaaatcgaataagtgcatttcaaatggataagcacttgcaacccgatgattaaggagtgcagttgaatcccatatgtttttaaataatcagaatttgttagaatgcatctgtaaaagaaagttttttgacagcttttcacttcacccagagtatatagaaaatgttgctaccttcatgtaatgtagtcttccatattctgacagaactatcattgcgtagaatgaagagaacacaaagagggcagagagtcaccttgttcaaatagctaaaagggatagcaagaggaagatagactttactccaggtggcccaagggaaaaaaatacatctaaagggaaagattttttaagggagtgaggagtgggaggagagttagagaaatagtgtagcaatctgagctgctgaagagaaagtgctttagtgttcacagtaggggctgcagtttgcagaggctagagagggggagtccctggtaccatgtctgaagttccttctaaccctgaggtccttgatgctgggcattggcacacctcacagtgagatgatttctgacacaaactggattggtcaccattataaatgattcaacttatttcagaagccacttttgccagctttccgctatatgcaacaaaaacctcaacctctgaatatgaaaaattcaatccatttgctttccttttagctaaaaggaacccaaaactgactccgcttattgctggatttgtatgctacttgctaaataaatggatctagtctagatgccaacaataccctgaggatgtagaaaacctcctttgcttgagtcgagcgccttgaaatagctctgttgcatcttgaacggggctagtttgttaattcgatgagtaaaggggagagtaccatcatttcgtttgttcccgtgcggaccgaacacggtattagcctctctgcagatacaatctcacttagacgtaccagccactgtgagagtgtagaagagtttatcccgaatccacaaacaggaaagtggagtcataggcaggaatgcactcaggttgtggtgggaagtggatcaaaacccagttttgtttttttttttttaattttaattttagggacagggtctcggtctgttgcctaggctggagcgcagtggtgtgatctcggctcagtgcaacttctgcctcccgagttgaggcaactctcctgcctcagcctcccgagtcgctgggattacaggcatgcaccaccacactggctaatttattgtattgtatagttttgtagagatgggggtctcactttgttgcccaggctagtcttgaactcctgggctcagtgtatcctctggcttggcctcccaaagtgctgggattacaggtatgagccggggtgcctggcccaaacccaggtattttactctacaatgcttgcccttttctcagcccttccttgcttgcaggacacctgaagtcccttgagctgctgtctatgggaaaggactcaagagcctgccttttcccgggtgaaggtagctggttgggcctggggtgtgaagcatgaaacaggtactgtgcatctcaccacagctcagagatggaaggatgcagcttcttctgcttttgttccacttcaagtctagcccctcttggggctgcttctctccgaggggaagtggggcacctggagggggggcaggtgtaggtgattggagctggaatttctctagtgtgatagtggcatcagctccacattctccccagcatgtcgaatttgtaacaaagctagatgtgaagagtcttccccagaacatccctcaataatttgttttaataatagacattttcagcttaaatgtgagtttttatcggagatttcccccttcccaatttgtgtcagcaaccgttattaaattcctaggaaaaggcaaatgttggggcttggtcagaagtgaggccgacgtataggtgccagttccagcctgatgttccccaccgatgtccatgtgctgactcagtaaacaactgcctttcttctgaatggtctatgtgagctgttgattatcatgttcttaaagaaggctgaatatcttgtgcctttcttgttaagcctgtgtgtcttgggacagctacacacactctctaagttacagttttctgagctttgggtgaggggatgttcgtctttttctgcctgcagcactgggcctcgggaagcaacttagggttttggctagagcaaggacagatctgacatctagtccttcttctgtgttttctgtcaatcccagtttccctctctttcaacctgagctggtagcactatccttttactgtttagagggttaagagagataacacctagtatatagtagctgctcagaaaatttctcgtttccacaaatgagaaagtgaatgcaatagacatttgagaacagtaaatgtgtaatagaattattagttctttgttctaattgtcaccggctccgtttaaaaaaatacatatatggtatttactttgggaaagctgcaagccctgtctccatcacctccttttttcaagcgtggactcattttcatctgcggattccctcttgcctgaaggccttggtgccgcatgagcaagtgcagtgctgagagctgtgtatggagctggaagcacaggccactttctgctgccgagaaatcttctgccctccgagggcacaggcttgactgcaaggggatgtgggaagccatttgtgagaagtcgtaattaatgatctgctgggccttggcacttatggaggaagcagaaagcagctgggaattgaaacagcctcttggataaaagttgtcctcctggggctgcttccctctgaggggatgcgagggacctgggagggaggggcaggggtaggggtctctgtagtgcgaattactcaatgctactgtcttttccacagcttatagggctgctacctgccatgcatgatatccaagtgatatggccaaagaaccctagctcttgagacaaaacatcctgggcttgaattctagctcttcctattgctccttacatctggacagttgccctccatctctgagcctatttttttcatttgttcaatgaggatggtgctacatactccgcaaggctgtctggattagaaactgagtaacataaatggaacagagtaaggactcagaagtacttgggataaaatatacagcaagaaacatagagcccccgtcttcagggtgcttacggttttgtggataatagaaatcgcattatctatataatgtgtaaacttgtggatatttctgtagatattgctgtagaatgtatgcacatatgtcaggtgatattagatataaattgctgctaaattattcagatacttctcataatataaattgttcttctttggtggaatattgggatgcctctgtagtgcaaattactctcttttggtgagttagcaagaatctatcataccttaatttgatcttacttgctgctaggctgatttgaaagttaacttacccttcagatgactaagggctattaaatccctgaaggaatcttgcagataactacagcaaataacaatatcttctattgaaaacatatttggtattccttgtaccaaccttataagaatgctttgagtatgacatgaactacagatactccttgacttaggatgggatcatactgcaataaacccatcataagtagaaaacataataagtcaaaaatgcacttaacacccctcacctactcaacatcacagcttagcctagcctgccttaaaagttctcagaacacttatattagtctgtagtttggcaaaccatctaacacagaggctatcttacaataaagtgttgaatatctcatgtaataattgaatgcattactgaaagtgaaaaacagtatggttattatgagaacgcgagatacggtttctcctgaatgatttcactttcacaccattgtaaagtcgaaaagtcttgagtcggggcgatctgtattgcctacaaatcaagccgtgcagcgtccacacctagcaagggctagtgatggttatcatagcaacaagtcctcctgctctatagtcataacaataatattttgtagcatctattccattgtgttgcatgaagggttacagaatctaatatatgcagaacgctgggcacagtgcctggtgcattgcattgtaagagctcaaacagtgtcagctgcaatcatcctcattaattctatcttcgcagtaactctgtgaagtgctttagggaggcgttacagtcccactttaccggtgagaaaaatgaggctcaaagaggcttgttcagtccgcacagctgacagtgattgctgcgtcagggccagctgtagccttattcctgaatttctccttatacctcttcagcccctccttccatttcatcccagttgttgttgttgttgttgttgttgtttcttaaatcaagagtttgcatgcatcttccctttgattgcctgggattttttttttttttttttttttttttggaaagcagtcatgaagatattgcctagcctcgggtacacaaattctggatctgctttccaagagaacccaggaggaagaagatgctgtgacaggcatttcttatcagggagaggctcccctgcttgcacttcgaatccacaatgatgaaggaattttccttcctgggcgtatttgcttatgttcttggatgtgctggtaagcccctgcctacccacctctatgtaaatgagtcctcccacaagctcgggatgttctgtccccaaatcctgaacaccatgtacaggagatgggcttagatgttgcagaagcaaagactgagaggggggcagcttttggctgcaattaactccctttttgactttatcctgggttggaaaagaccttcacctggctaggagatctgaaaatgtgcctatgattgtcagctgattttcccaggtcatgaacctgggcccctcagcctggaacaccgtgggaggagagggaagccaccctcgtcactaaaaggtgctacccttttattcaccttcctcaagttagaagaactgtttctccagctgtaccaaggctgtgctggaattgggatcgcagagcagtgcagaatatttattaaccacctactatgtgactgcggaaatagactcatcaaactattttgggtccctcctggatgctgtgagagacctaaagtaaatcgttgcaatacttgggttcttgacgaagagcgttggcttcacaatctggcagacctgttgtcctatcccagatcagacttactgaacctgtgaattggggcaagttatttatctcttctagattcatttcccttacttgtgaaagatggtaataatgtgtgtcatgtaaaaatatgaggatattagataagcactttgtggtgtcttggacctaaaaagcagttagtgtgtggtggacattgtatatctttaatatccagacctttcctgggatgccaaccttgttatctacagacatactgcctgagggtggaggtttgaattgaggatacagataggacagtgttcttattggggtggctgataatagaataattgcttatttatcttataggttgggaaatattggtattttaaaggtgggttttccagagttgggtataagttcagctacccaagacaacaggttactggggctgtatggctttgcatccagagttaaaagccaggcctgggaataattaaaatacttttcatcctgggaaattctgctttaactggtttatagcagaggctgcgcatcagatgttttcaaaattaagtgatggtttatgtacaatctaattcatccgcttaagtgtacagtttgaattttgatgattatatacaatctcacagtctccactacagttccttgaccttaagtttccttacgctttattttcagtctattctgcccccccattccctaacccctggcaagtattaatcagctttctgtccctgttgttttgaatttcataataaatggaatcatactgtgcagagtcttttttgtttgagtcctttccctgagcataaagtttttgagattcagccataattgttgcacatattaacattttgttccttttcattgctgagtggtacgtcacggtaggaatataccaagatgtgtttatccattcaccagaccaattaatggacatttgtttctagtttttggctattaagaatgctgtggaatttgagtacatgtctttatgtggacacatgtcttcattttggggagataaatccttcaaagtagaaatgctgggagacatggtaagttcagatttaacattctaggataccattattgttgttatccaaagtggctgtgccattttgcttttccactggcattgtagcattgggtatttatttattttttagacagagtctcactctgtcacccaggctgtagtgcactggcacgatctcagctcactgcaacttttgcctcctgagttcaagcaattctcctacctcagcctcttgagtagctgcgactacaggcgcccactaccagagctggctaattttttgtatttttagtagagacaaggtttcaccatgttggtcaggctggtcttgaactcctggcctcaggtgatccgctcgcttcagcctcccaaagttctgggatgacaggcataagccacagtgcctggctggcattgggtatttttcgcacagctcccagatgtttatattgttatgtatctaactagcatggatatcctctgggctctgttttttctgatttaatggccacctttgggctatcagatgaataaggatattgtcagtatcaggaaagtaaagaagacatttgtcccaacccatatgccccaagttgttcaaaactattgaggaaagagatactgtctgggttttcataactcagttgcatttttatgtcttgcatatcaaaatttgtatgcagggttacgttccccaacattaatccacttttttttttttttaataacagaggacttgacttagataaagagaagtcttattccctcaggtaggaagttgtttccacctgctatagacacattagttaataatcaagggacaggtgtgttcactgacctacctgttattttgttttacaactataatgactagttctgtttatgcatgcacacacagctgcaccctcgcgtgttgcttttccctcatgtttccaggcagaccacgcagtgactatttaatgctttgccttgctatgcgctgttgcttatacatttctggaagacattttcccatcctctgcagtttaccttgtacttttattttctccttgttgaattacaaatagattaacacgctcaataggttttccttgaatccagctgaatgcttcaacctcccacatgtgctttttttagttttgtaacatgacagggaatgaggtgaatgagctgaggatgtggcctttgtcttgggctgaagcagttctcaacccccagatggcttgtccctactcccccaggcaagagcccatacctcaagattataaagagaggttttaaatagaagattgttctatctaaacatgtgcctaactgacatctattttgttattatgtgaaacacatccatatataatgtatatgtatccataatgtatgtacatatatgtatttcccaactctctcatgtctgaatattacatcccttgactatcttctgtggctctccgagtccacttggcatttggttatcagcttatacttaacagcaagtgtcggtctgcaggcccatcacctatttttgtaaataaagttttattggcacatagccacacccatttatttacatattgttcatggttgctgttttgctacaactgtgaagttgagttgtgtcaacagaaatgtatgccccatagagctgaaagtgtttcctgtctggctctttacaggaaaacacaatttctgatccttcttctgtgctaccacttggtgtgtttgcaacttcactgtgctgtctgtgggtatttgtgtgtttgtgtctttttttttttttttttttttttgagatggagtcttgctttgttggccaggctggagtgcagtggcgtgatctcagctcgctgcaacctctgactcccgggttcaagtgattctcctgcctcagcctcctgagtagctggcattacagtcctcctgagaacctgccaccacgcctggttcatttttgttttttttggtagagatgcggtttcaccatgttggccaggctggtctcgaacacctgacctcgagtgatccaccctgtcccccggcttcccaaaagtgctgggattataggtgtgagccatggtacccggccttgtgtcttttctacgtggacagttagatttgtccagttaatcttaccttgggccagtcacttaacttctctcggttttatgtctacatccataacttgggcataataacagcatctcccctgtagagtggcttgaggattcaggggaaggcgagcaaagcacctggcattcacagtgtccagttcacatgacgagctcatttaatggcacccaggcttgatagaaggtatgtgttatgatctgggtggtatctcctgccattttggagcagatgctaagaagcaagtcattcagctgaggtctaggggaatagacagagatccaggccgttactaggagacaagctatgcaatagtcagggttccaacattgcctgcctcttccagcatccgtcacctcctgtttttgttcagcctccttgccactctgcagttagttcaaacacaattctcacttcaaggcatttgtttttgtctttttgaaatggagtcttgctctgtcacccagtctggagtacagtggcacaatctcggctcactgcaacctctgcctcccgggttcaagcagttctcctgtctcagcctcccgagtagctgagcttacaggtacctgccatcatgcccagctaatttttgtaattttagtagagatgaggtttctccatgttgggcaagctgatctcgaacacctgacctcaggtgatttacccgcctcggcctccaaaagtgctgggattacacgtgtgagccactgcgccttaaccactttcaggcatttgaacttgcagttcccactgcctcaccttgtttcctccaagacatccacatggtatactccttcctcaactactttatctcaaatagcggccccatcactgtcttgctccacgccctcatactcatcacatgtatgggtcattgtacttcatatcaatgtgtttatgtgtcagtgtcctgtctcctgtactgaaaggcactccccatgcagttgagaaattcatcttgttatatgcccagcacagtgaatttcacctgcgtgaaataggggagcactaaatattagttgagtaaatgcatgaatggatgaacattccttaaagtgggaatgtctttccatgtttcagaattctcatctgccatctctcttcccatgcatgaagataagcagtagactatccactcctgcacctgttcatatacatatagaaacacgcactgagaccgagcaccacacgcacagacactcacacacacacatgcattcaaacctctccatgcagacacattctctggagcagtctggatgcagcttgtaaaagtgcctcctcattcagcacttggacaacctaagagcctcttcagtaagatcctgatagctttattggagaggtcttgggtagaaaaaaagctgcagcttaatgaaggccttttaacagtcaatctcaattccaaggaaaagcaaatctattaccagcgtccgataatttctgctcagggattcccactcttggaatggatttttttttccagggcctcttttctaattaactctggagcgtagattacaagaggccggccttgtgaatgaagggggcacctcggcggaagtaatcactggaggtgatgtttaattaaagagatgctgttagagggaaaagacctgagcaggctggagtgctaatcctcttgccgtgctagtgtgtccctgcgtgattgtgattgatgagctggtcctgctcacatcttcatctgcagcgtgctcatccctgcaggaggggcttcagctccctccacatacatgcttagcctggtgttgttctggcatggtgaaagggatggctgtgcagtttccctttctcactctgcatttttctccttttctttttctcctttattatagctagatagttggatagatacacatttagatatacaactatgtacagatatatatggacctctatatctatctactgtctgcctgtctatctgctatcattctttcgttgtttgtctatcattctatcactctgtacattcatacattcattatccatatatacattcatccattgtctacctatctactatctacctgtcattctgtctatacatacatcaatccatcatatgtttatccattctgacatcgtctatctatacgttcatccgttacacacctatctactatttacctatcactctatttgtctgtacgtacatcaatctgtccatcatctatccatctatctatacattctcacatcccttatctagctatacattcatctattatccacctatctactatctacctatcactttatttgtatatgtatacatctatctatacatatccatacattaatctatccatccatctatccatctatacattctcacatccattatctatctatacattcatcccctacttatctactgtcattttatcattatgtttgtctatacgttcatcaatccatcagtctgtatacttcacatgtccactatctatgtatacattcatccattatctatgcctctaatctctctattgctctgtcattatatctacctacctatgcatctatctctatctttataaaatcttgctgtgaatctcagcgtgtctgtctccccatgtctgtgtctggctttgtcttcatttttctcattctgtccaaatctctctgtttctctgcctctgtctgtctctgtttcactgtttgtccttttgtttctcctaggtctgccctattaggtaattttagggaacgtgtaactgatacctttttttaaattcaagagtattaatggttgagtaatgtaaaagcaagtttttggttaagcatttactaaatgacaggaactgcctgaggtaccttttggcaagtatttcataattgttcttaaaatagcaaatattaatctcttaatatgtgccaggtcctaatgccaagtactttatgtattaatcccatttaatcttcaaaatagtcttatgttgtagcttcttttgctgttcctattttggagattaaaaaactgaggcttggagagagaattattattattattttttttttgagatagagtcttgctctgtcactctgctgcccaggctggaatgcggtggtaccatcatagctcactgcagcctcgaactcccggactcaagaaatcctccaacgtcagtctcccgagtagctgggattacaggcacacaccactatgcccagaaaattgttttttattttttgtagagaccgttttttttttttatgttgttccggctgatcttcaactcctggcctcaagtgatcctcccaactcagccttccagagcactgggattacaggtgtgagccaccacgcccagctaagttatgcatattatctttaatccacactttcgcacaccaagataacattttatttccaccttttaatgatgcatgtacaatggttttaaaagttaaggtgaattttccttggtcagagtttttaaagaatgtcattctagggatcttacttcagatgtgtctctctccaaaatgctccttttgaatggacagaaaggtagacctgtgtctccccatgtttctctgtgattgctccccctttaaatctgtgtcccagctacatttagtgaacatctttgccatgtggcttctgaatggaggaggctgcagaacttccttcagtcttctgagccataataaattggcagaaatgtctgatttgacgttttcccccccttgttcaaggcagatgcttttctcattactgagaaaagaatgacactttgtctctccaagagctcaggcgttcataatagataagtgtgcagtttctgatcttggagctgctagctctgctagactaggggaggctcagctctatcagggctctatccctggcgagattaggtttgcagaatctctactggagcttgtagctactcactagagtggattggtctatgattctagtttcactgtttatagttcaaaattttccagccagccaggctgtcttcttaattagaggggttgagtctgacatggaaggagtggataatgtacctttactccccattttcatctatcaatggaaaagaattaaaataaattcaactgtgacttgtttaactcccacattaacttgggttagcaaattctactttgtggaaggaaccatgaggaagaaaacagattgtaactatggtctgtgctagttcataagtccaagttcaactctggttgaggtgggggtgttgatagctttcactaaacctcaaattgttcattatcttctagtcttggtgaaacaagctttcccatgtctcaaaaagacccacctaataaatataatcaagtcccatcttacccagaaacagcacctgctgttactctctgattctcattgttttgctctgacattagggtgtctttatcagcctaaggatacatagattcttagacagtttcaatctcttatcttctttaggtggcctaaaatctaacactggagatctcttcatcatagcacccttggaaaactctgaaagctgtcataggtctagaaatccatcaactccagattctaaagagacaaccaaatggctcacacttcttaccgtacctgcacccacaaatctggctcttaaataaagtcatcagccctctaattatactaagatattcaaatcatgagattcgctctgaagccaattcttcaaccacccacttacccatctttgctttccgggcattgccacatccctttttcttggggtttcctccgcaggaacactccttatctgcgactttggttgactgtaaatcttgtactgttgctttgctatttaatgcaacttgtcatcttgtttttggccttgatttgatatcctagtaagggactcttcttgggttttgctttaagattcagtctgctgaagggctgtgactccattgtgagcagaagcagcctgggaaggcaggactagacacaccaaacatcagccagacaggtgatgtgatccctctgattttcagaattcctttgagagatcacttggcccttccctgctgatctttgggctggagtcaaggcaatcttttgaattagttctgtctctctctaaattatttgctttatgtaataggaacatgcctcatttgggctctttattttatctattttatttgaaacagggtcttgctctgtcacccaggctggagtgcaagtacatgattgtggctcacagcagcctcaaactcctgggctcaagcaatcctcctgcttcagccccctgagtagctaggaccgcaggcacatgccaccatgcccagctaattaatatatatatatttaaaaacatgtccttgtatttaacagaattttaaggaagaatttgatttttagtaatttacaacttctctggccaatcttccaaatctggctaattttcattgtaccactccgtgtgttccttttttgtcattctgaatattgatgattatagtctatgttcctaacgcctaggctgataacactctactcagcctactttgttcacatttccagcatcagaatcctgtgttccatgcttgtatgttgtggaacgagctcaattttcagcattaaatttaccatgccaaaaggtggaaaaagactctgcaataaacagactacttagcatgattttgtctgccttctgcatttggaattcccaacataacctaagcaggcataaaattcagttctttaagattcgtttaccaataagaatgttgtaaaaattcaaataaaaggaatgcagattagcagagagaatgctaagcaagttttttgtttctgtccttggtgctgaaaaaaatgggggtcaacttttctaccttagtgaatttaatgatgtggtgattgtatttaaatgactatgtgacaagggatcagatacttccctataatcattctttagtttcctagaactgtagaagcttggtggcataatgagagctgcctgtcacctaccctagaactgtcctgtctcatatgacagccactagccacatgtagctacttaaaacgacactaaataaaattaaaattcagtttcttagtgatatcatttagatattgtcccatctaaatctcatgtcaaattgtaatccccagtgttggacttagggcctggtgggaggtgattggaccatgaaggcagatttttttatgagtggtttagtgccatacccttggtggtagtggcatgatagtgaattgttgtgaaagctgactgtttaaaagcggttggcatcttccccttcactctctcttgccccgactctcaccatgtgacatgcctgcttctgcttcaccttccaccgtgagtaaaagctccctgagacctccccagaagccaaactgatgctggcaccaaccatgagctaattaagcctctcttttttgagacgtcccccaggctggagtgcagtggtgcgatctcagctcactgcaacctccgcctcccaggttcaagcgattctcctgcctcagcctgccgagtagctgggattacaggtgcctgccaccacacccggctaatctttgtagttttagtagagatggggtttcactatgttggtcaggctggtctcaaactcctgaccttaggggattcgcccgcctctgcctcccaaagtgctgggattacaggcgtgaagccactgtgcgcagccttaagccccttttctttgtaaaatacccattctcagggatttcaagaacagactaacacactcagtcagactgtctacctttcaggcgctcaacagccacacgtggctagagtttcctgtgttagacagtacagatatggaatatttctgtcatctcagcaagttttattggacagtcttcccctagaatcattgcaatagactcagtaacgcccacaaatctgtccacatcataatcactggaacctgcgagtgttactgtatatggaaaaaggacctatgcagacagatttaagtaaggagaattatttcttttgaattggagagattattctatagtatccagatgagtccagtgtaatcacaacagtacttacaagggggaacacagaggtgtagagtcagagtcagagaggaagaaaatgtaataacagaatcagaaactggagtaatgcattttgaagttggagaaagagaccacaaggtaaggaattaaggtggtcattagaagctcaaaaatggcaaagaaaccgatgatcctctcagagcctccagagccctggtgacaccttgactttacgtcagttgagaaatcagaactaaaagagaatatgtttgcattgtgtgaagccacaatgtttctggtaatttgttataacaacaatagaacgctgataaaatcatcattatcattgtcatcatcattatcgtcatctcagtaggtgcttggttttagtttgggttcttataattttgcattctcaaatagaaagtcaaaacaatttcttagttatttgaagaaccacactgataagcaatggcaccttttattttttgagattttcttattggcttgtgaatgatttcttctccgagagtggttatggaggcttaaacagtatgtcatgagttagcaatgtctagtgggggagctataatagataaaggtgagaagagataattcacatggccccactttctgatttttttggactgggatgtttgtcaattgcaattctcgttttgagcatggtggtcagatgagattggccttgctgaagcacaggcaagcatcccattaaatgcttttaggtgattcagaaccaaagctcaattcagtattttaaaggcgccctttggggagaccatctctggccttcctaccattggcggctagtgtgttattttccaagcccgctgtgtgatgatgggtgtgatgtgtcacactccttctctgctccctcaacatgctcctttcctcccaggctgggtttgatggattattttttctggaaaattttcctaaccccctgcacactgccatccaagtcacttcgcttaaataacaataacagcaataatagcacagagatgttcagcatagtgataagaaatttactttcatgacctaatttattgtagaaataatcctatgaagggtatgcagtttttatctctcttatgacagagaggagccaacactcaaaaaggtcatgatacttactcaaagccatatacctggtaagaggcaaagccagcatttgaacaacaggccttctgagtctggaagtggctttcattccgaaactcagcagaagtttctccttcccaaatgcttgagctccttaatatcaggaactgtgttacctactttttttttttttttttttgcactataaaatcttcattctttattttagatacaggaggtacatgtgtaggattgttacatgggtatattggaccaaggtaatgagcatagaagccaacaggtagttttttactccattccttcctgccattttagtagtcccccgtgtctgttgttcccttatttatgaccgtgtgtgcttgatgtttagctcccacttataaatgaaaacatgtgatactcgttttctgttcctgcattaattcagttaagataattgcctccagctgcatccatgttgctgcaaagacatgatttcattctgttttatggctgcatagtattccatggtgtagatataccacattttctttatccagtccaccgctgatacacacctaggctaattccatgtctctgctgttgtgaatattacagtgattaacatacttgtgcaggtgtctttctgagataacaatttcttttcctttgggtatttccccagtcatgggattgctggattgaagagtagctctgttttaagttctttgagaaatactcaaacagctttccacagtggctgaactaattttacacacccaccaaaagtgtatcagccatcctttttctctgcagcctcaccagcatctattgttttttgactttttactaataggcattttgactggtgcgagatggtatctcactgtggtttagatgggcacatatttccctgatgatgattataagcattttttcgtatgtttgttgactgtgtttatatcttcttttgagaaatgtctgtttgtgacctttgtccatttttttgcatgtgcagaatttattcaagttttaatataattccatctttaagtctcagaaacctttttacatttattttaagactacacattgggtacagtacacactgcttgggtaacgggtgcaccaaaatctcagaaatccgcactagagaacttattcatgtaagcaaacatcacctgttccccaaaaaccaattgaaataaaaaataaattactttttttcttctccattcaaagatactagactattttttttgaaaatcagcagaatttcattgaagttcctcatttaaatttatgtttgaatcctgtagattcttaataagtacttccatacagagaagaagctaataagaacgttccagagagatcctacagaacgtggtgtggtgggaagatactaggctgggtccacattctgtctctatcagcagtgagtcagtgcacacatcctaccttctgggcatcagtttcctcacctttttattttattttgttttacttttgaagtagggtcttgctctgtctcccaggttggagtacagtggcatgatctcagctcactgcaacctccatctcccagttcaagtgattctcttgcctcagcctcccaagtagctggaattacaggcatgtgccaccacatctgtctaatttttgtatttttagtagggatggggtttcatcatgttgaccaggctggtcttgaactcttgacctcaagtgatccacctgccttggcctcccaaagtgttgggattagaggggtgagccactgtgcctggccaagtttccttatctttcaaatggggatagtgatatctaactcagagcccttatggggatgtaatgaggtaatagatgtcagtcacttagggtgtatacatgagtttaatcatcatcatcatcatcattaataccatttctgtacccccaaagtgtgtgttcaagtacttgtccacattcagtggtcatagcaaggcctcagtttacttgaatgtatttacattccaacaatgtaaaccttaacaaagactttttttttttaaatttgaccactgcagtgttctcatagaaaagactacagaacagaaaaaaaaaaaacagtttgcattgtgtaattgctccaaattgtattttcttttagaaaataaaaaataaatcactagaatcctatttaaatacaagtttaaaaattaattattttgcactagacacagaatggactgaaaaaattaggattagagtcattggtacccatacagatgtgaagaagttgtcctgagagtgagcctctggtttcatctgtgcttctctgtctccacttggctttgtcacgtctcccataaatgaccacagtcattttattgcctctctccatgtccccaccttttcctgtctccagcctaccagccatttagtggccagcgtggtctttctaagacaaacctgaccatgtgaatcccatgcctggaactcttcaatggcctcccgttacttaaaggatcaaatacaaactactttatgtgtcattttctgattctcttcctatgcccacaaccttattttctagccccagttcctgctaaatcttcaccacacctatactccagccatattatcctgttttctgtgttcttttatgccctgatgctgagtgtgtgcttttcctcttccttgaatttgcacctaactcactccatcatctcctcaagattcctctcaactgctacatcctttaagaagcatttgatacctcctgtctctgaattgagagctttcttctttgccccctataataatttatacttataaaatccatgacacttgctttgatcatcgattttttggtatctctctttatccagatcttaatctgcatgagagcaggactattttcttatctctgaatgtattttatattaatgcaaaaacaaatgcttattgtgaacctactggggaccagacacagtggataaaggtacctctagtgcatttctaaacatagtcaaaaactacatttcgaatgaattaatgaatgcaagatatccttccatgtgtcactgagacttttaaaaagaactagtttctttctgatcaaattcaatggataaccttgcagagcaagatctaactcagaatgtctacggatgccttaagcattctgcatactggagcgttttcaagagcccttctctgacctcacacacagcgaatgtctgagctctgtaggctatttgtagagagtttatttcatctttgcagaaagctgcccagtataaatattagtcagttgatttcacacagagtaaaaacaagcttttaaaagcttttacctctcctgtccccaaataggtgctttagacagattctctgagccttgggagctttgttggatttggtaaagtgaaagttatgttctgttccgaagcagccttctgtgaaggctgtcttggggttgatgctgtaattgtgcagaaaggtaaaatgaagaataacaaaggtggcgtgtggggtgggatggagatcaagcttccctgttctggatatatctccataagtccatttcaaaaaatgttcacgtttggtgccaaggtggtcacttggtattgtaaaggagtggtggcttcaaatttaaatagtctaagttcaatcttagctctattaatgaactagctaatggtgtacatgggtctcactcagcctctatgacacctgaaccaatgagtatagctagcattgtccaacagaaatataaccatggtcacaaatatgaatcacatatgtagtgggtttttttttatactttctggtagccatattaaggcaaaacaaaatgcgtgattttaatttcaatattttattcaagcagatatatcccaatatataaccaagcataattttatttacccagtatatccaaagtgttaccattcaacatgtaatcaaactgacactactaaagagatatgttgcattctttctcttgtatgacgtctctgaaatctggcgtgcagttgccatgtacagtacgcgtcatttcagaccagccacatttcaacacccaatgaccacacatggctagtggctaccatgttaggacagcaaggtgaaactacaatgcttaagctgatctagcaagctcttaaagctctctgactaggattacaatatctgcttcacagagagcaaatgagatcgcatgaaaattgtcatgcgccccaactttctcctctgaagtgttagtgtataagcaacagattaagaggataaggtgtcacaacatccttagctgtttacctaattgttgcatttctatcactggacctcaaactccatgaagtagacagtgacatcactcaatactaggtcttccgtgactagcacgtaatagatgtattaatttcccagggctacgaaaacaaagaaccacaaactgggtgacttgaaatagaaatttactggctcacagttctggaggcctgaagtctgagacaaaggtgtggataggactggttccttctgagtgctgggaggacaatctgccccatgctgctctcctatcttctggaagtttactgacaatctttggcatcccttgagttgtagaagcatcacccattcatcttcagatggtatgcatatctgtgtccacactttcccattttataagacacagtcatatggattcagaagcccaccctgctcgctactcaggcatgacctcatcttaactaattacatctgcagtgaccccattcccagattaggttacattctgagatactgggagctgggactttagtattggaatttgaaaataagacaattcaaccaataacagtatgtgttcaataaattcaagtcagatatatgaaaaaataaaaattgagtataaagataatttttggctacattgactggattccaagaatcttccattctgtctaaagaagatagacacgttaaaaatcaaacgagaaaaaacagtaagtgaagaggatgaatgcagccagtgggtagttagactatgcaaaaacaagtgcgccagaatcacaactcaacatatattaaggctttcatttggtggtgttttgaattagaaatatttaatgtcgatcagcctcagtttccttagcattatctacttcgcagttgttgagacaattaactacaatatcctaagttgcacacaattattgggccagacttctacactgtgagtatctgcaaaaaaaagaaaaaaaaaaaacattgttcactgctgtgcttcttccctctgatttaccaataagggaaacatcttccatatttccaaaaacccctggttttccttgagtacaccttgacatcatgcaaaacctcttcttcctcaagtcagccaggccctgctgtactctaagctgcaacccactgggctcagcattcaatcaggcagacgtccttaaaagatcacacattcttagctacggaagaataatatttatgcactgcttaatcatgtgaagaagcacagactctccagtctcaagtggagacattgggtgatgtataggcttagagatcctcatattgggaaagagtcagttactgatcttggctcttcacttgccaagatggaactgtttggtttcaattctgtgaacatacttacaaagtagtaggaacttcaatactgtgtgcttctgcttagttgggttgtactgaatttgtaagtccagtgaggttgtattttccctttgttctgatgagaggtctagccactttgtgtttcaactgttataatgtccatattcagttttcttattcccccataaaagttcatgagatagaaatggaggaaacgtagatatgcatcatgcatctaagcctattgttgtagctagacttgtcgggtcatatggatgaaaatatcttagggaacagtttgatgcattggaaatacctctagggttcatatcactagatatgatttgggcatttcactgagttacctggctctcagcttcttccactaaatagatgtgaatgatacccattctgactttctttcaatattgtatgtaaggcttaaaacgattatgtttaaatgctcccaataacctttacaacctatcccatgatatggtttgtcagtgtccccactcaaatctcatcttgaactctagttcccataatccccatgtctcgtgagagggacccggtgggaggtaattgaatgatggggacagttacctccatgctgttcttgtaatagtgagtgacttctcatgagatctgatgggtttatatgaggctttccccctgctttgctcggcccttgtccttcctgctgccatgtgaagaaggacatatttgcttccccttccaccatgattgtaagtttcctgaggcctctccagccaggctgaactgtgagtcaacctctttcctttataaattacccagcctcagatatgtctttacttgcagtgtgagaacagactaatataacccagctgagatattttgatgatggtgatggagaagagaatgatcatttgtcctatttacctaaagtgactacttgtttcctctgcttatttcttctatttcaagcactagagttacttccattgagaaggtaatgtcaaaatgtagcttaaattatcagctctctctctgttcttacccttcctctttccttccattcataagacaaaggaatgcataagacagctttatcttggcatgtatcattgttgcatttactctttgatttaatcaaatcgtgtttgatcattcactctgtgcttgccattccaatagtgctggggatatgctgtcctataagacagacataggtctctgcttttgagagctttacaatccagtagcctccaggtcttcagcccagctctatattttataggtcctatgtctctgtgaaaatgtcctcattgctttgttctactttgttttctttgattctgccactcagactatcagatattctgtcctaacatttagcattacaattggcctttctacatattgttttgtcagtctgtatcctaccacctggctgcttcctgctcttcaagaacatcaggttagacatcagttcttctggaaaaccttacctgataaatcattttgtttcttaaatttatcttctctgggcacataccctattgcactgtaaatctctaggctattctatgactcctgccagcctgtagctatagaggtacctgggctatgtctaccttattcaccactgtagcccccaaacatagcacagtccctgacatccaacagatactcaatacctaactcctgaaacaattgcgtgagtatcatgctcttgcccatttggacagttcattgcccttgctttctggcaatctctcctaatttcatttcttccaagtccgactatcattcattttatgacagccttttttttttcagctggcaaactatgagaggctaaaacttatgcaacacacaatgaaagacaaggtcatattttatcgtctttgcctgttgcagtaaccagattagacatctttctacaagtgaggcgaatgcaagccaaccgatatctatcatgtcaaacacctgattactatgtgcggaagaaaaagagggaaccattaaagatacatggacaagcacctgcccttaaggagcttacaacattgtgggaggtctctggtttcatgtaagaaaatcgaataattaaaaatacaggcagatgcttggctttgtgcattctttataaacaatgtaggggtggcaggtggttgctaagttttcaccatatcatgcctccacaaagccattgggttgtttagactatgtttacgtacccagctttgaaaaggggctgaagaagaaatagaagatatgttgattcatggtagtgaggcataaacttttttgtttgtttgtttgttttgtttttttaattatactttaagttttagggtacatgtgcacattgtgcaggttagttacatacgtatacatgtggtgaggcataaacttttatgatgggtagaaaactttataatgtgttataagaagaaatgattctgaattggctgggagtactggctcatgcctgtaatcccagaactttgaaaggccaagatgggcagatcatctgaggtcagggtttgagaccagcctggccaacatggtgaaactccctgtctactaaaaatacaaaaattagccaagtgtggtggcaggtgcctgtaatcctagctactcgggagcctgaggcaggagagtcgcttgaatctgggacactgaggttgcagtgagctgaggtcacaccactgcactccagcctgggtgacagagcaagactctgtctcaaaaaaaataaataaattattctaaatttatccatgtccaagattatggcgtccactccttgcactactttttatctagaatgtttatttttctcttcactagaacattctgtcatctgtaacctaatcccattggggagagtatttgattatcctttcgttagtgtgacttaatgctgccaattttccaaatctagcaagagatccttggtgacattcttagtgggataccgtagtcagcaacgttcacggcagagttgctgtctctctaagcgatttggttttctttgtatgtataaggacttcctctcttacaaagaaagttgtgtcacattcgatcgatcaatttcctcctttagaagcaggcagagaatactctggacagctatgatggaataagtcacacagcgatattatctcaaattatatctgtagggtaactgcaagtcaggtatttaaggggacagaatccatccttctccccttgtggatttggttaaatgtagtagtattagcaatggcacaagtcatctaaatttatcttgaatgtgaatttgacactgatgttactctggtggtagtagcaagaacttttccccctttagaaaaagtgggctggtgaaaggagatggattatgaaagtctgttcaggattgaggcttcccgcatacccaggaggtggagaatccctattgaattaaaattcaaaatgcatctgtctgttctttcccttacaaaaattcacttttgccaatgtttatttgcatggtttgattttctgcttgtccatatgcccttctgtccatacaagtatatctgtgacagtgatgggcagccccatctgtcactcaggaatggatggcagtggtgatggttggttggtattgatagccaagtacttactacagctgagctttctggtcttgactgtgtattatagttatgcaagaggttatcacggggaaaaatggatgaacggtgcccaagatcaccttctacattttttgaaactttctgtataattatatctctatgattatttgaaaataaaaaattaacaataatggcagtcataggctaggctctgggttcagaattgggttggtacaaatttcttcatggaaccatcatgacctgagataattttcttagcgtctcagagcctattatttatgaaatgaagataaagtcggtgcccgtatcatcgggctgtgggttgcattgatggaagttctatttatagaacatttagggcagtggcaagcatgtggtttaagcccttctaattgtattattgttattatcaagaatgttataagtaacactatcatcattaacgtgattaatctacctgggttctggatcttagggtggcaggaacatggtcttgtgcctttttgacaacctctaattttgcctaggatactaaaagactttgtcagaatgtctcaaaaatattttatggtgaattgttccaccataactctcacaaatatcacctcttatctcagcccacaaaaaaaggtcaattatagataaaggaaaggacctcattgttgccgaaagacttagatatgaggtctggatttgcacttattcacttcaagactttatgtttccttatctgtgaagtgggtgtgctgaaaatgagtttattactctagctcctgtggagatgaagtgagattatatatatatatatatatatatatatatatatatatatatatatttatatatatatatatttatatatatatatatttatatatatatatatttatatatatatatatagtgactaacattgtctgatacttagaaggtgctggaagaataccagctgttctggctgttagtttgtattaataacaggcaataatacggcatttgaagcaatttcgcaaacagacaggtgaagccctacgcagcatgcctttccagcgcgaaatgcttcagtgcaatgttaggatattctaatggggaaacttttttcagtaatgcagggcaacggtggatggttttgaccttgctctcagtgccccgaggtgctgagtgagtcagaacatgtctcagtactactaaaaatgaagagactagcttgggattcattttttattcaacaaaacattttgaatgcttttgtacatgtgtgtgtgtgctcgcatgtgtgtgcacctcagacactctttgagatgattgaggcaacagtgatggaccaaaaaaaaaaaaaaaaggaaaccagacaaggttcctatactcatagagttcacagtccagttggagatggacaccaaaatgtgtatataatgtcatactttgacagaggttttcagtggcaagacagggtcctctgagaccctggaaaagtgagaaactccatcttcctaagtgcttgatgccgttggttgggaacttcacttgttctggatgtcgctcattttttaagggctaagcacatatttccctttggaattatcacctcagaagtggccatatccaggtctctgacttgtacagagtaccataaatattttattgtcagtgacttttaaagagttgagaaaaacagcctctccattgccttctgtaactccaaatggaaaatcaggatggaacattttgcaaacatgacacctcctcactgcaagtcgaccgcccactcggttggcttgtgtttctgaggctggtgtttgtcagccatggcaagatggcttccatcctctctctgtgcttccctactgagccggagaagtgaaatgagacaagtagctttgctggaatctgtaacatggattctgtcatctttgttgtttgttggattttatgaattatggcttcagcacaactttagagttctttgttcaagagataattttctggccaggtgcagtggctcatgcctgtaatccgagcactttgggaggctgaggtgagtggatcacaaggtcaggaggttgagaccatcctgtctaacatggtgaaacaccatctctgctaaaaatacaaaaagatagccgggcatggtgacgggtacctgtagtcccagctacttgggaggctgaggcaggagaactgcttgaacccaggaggcggagtttgcagtgagcagagatcgccccactgcactccagcctgggtgacagagcaagactctgtctcaaaaaaaaaaaaaaaaaaaaaaaaaaaaaaaaatttctgtaagctggcatagttaccagaacaaaagtttatatgtttatctaaatgaggtcagatctgaattcatctccaagtatttaagaatatacaatgtaggattctgacagatttgggtacctggcactaacaagttgtgtgagcatgagcaagtaatcccacctagcttgaaaaagaagataaaaatatgcggtgtgttggattcttgttaaatgaggtaatgtaggcaaagctactttattgaattttgtatgcttggtgcttagaacaataatcagttcataattggtgtgcaagaaaagatttcttttcctcgttaccagacatcgtcatcaccatcaccattattaccatcaccttcatcatcatcatcatcatcatcatcaccaccaccaccatctttgcttttatcttcttatggattcagtaacaagaattcttcaataagactcataataagattgtgttaaaattcgggttctttcccttactaatgtacgagatccatgtgttggaaagtgttttccatttgtttagcacctcagttttcttatctgccaaaggtaccataatgaggtatgtgatctgccaaaggtaccataatgagtttagtattcactgaagtaggttagagtccaacacacatcccttcttcctgggttctccagaggaagaacttcactggactggaaggaggatcagttttatccccacagtgggacatatgtgcatacaggactttctagattataaaatacattccagtagatttttccctctaaagcatcgtaagagtctcactgtgaagaataatatatattactatttatattttatgaataaggaaactgggtcacataaaggttgaatgacttgccaatagtttcaccattatgctcttgatgcctcaatatttgactttgatttcatagtcacagcattaaaaggttagatagtaacactagaaattacctggcctatcatagtgtttttccatttatttatttttaccccaattcataaaagattttacactctgaacccattcctccacataaagttttcatgaaacaatataaactcttaactattttattcttctctcatgtgtgtagattatttcatttaaagaatgttggtatgatgatcccctacatgggtcttacagcctaagagatcagactgacagaataaaaaacacagaacatttttctccaggattgtgtatcagaactatctggggcaacttttgacagtgcccatccctggatcccaccctcagagattctgaggcagtaggtctggtgtgaaggccttggaacgtgattttttttttctttctttcttttttttttttttttgagacggagtcttgctgtgtcacccaggctggagtgcagtggcgcgatcttggctcgctgcaagctccgcctcccgggttcacgccattcttctgcctcaacctcccaagtagctgggactacaggcgcccaccaccacgcctggctaattgttggtaattttagtagagacgcggtttcaccgtgttagccaggacggtctcgatgtcctgacgtcgtgatccgcccgcctcggtcttccaaagtgctgggattacaggcatgagccacggcgcccggccggaatctgttatttttaaaagaatacataaggagctcatgctccactgactaaggacccatgttctgttgcatctatctgattgtttccagctgaaactctttaactctttgtctatttaagtttttttttcttttctttttgagatggagtctcaccctatcacccaggctggagtgcagtgatgcaatcttggatcactgcacactccacctcccgggttcaagcgattctcgtgcctcagcctccaaagtagctgggattacaggcacctgccacaatgcctggataatttttgtatttttcgtagagatggagttttagcaggttggcctcaaagtcctgacctcaagcgatccgcacgcctcggccttcctaagtgctgggattacaagcgtgagccaccgcgcccggccagttgttttgttgttgtttgtttttgagtattttctgcgttattccctaggacattaatgctttcaccagggaattgtccgtcttggtcttgtctctctttccaaggttgaaggacagaagttggcctctcagttgaggacaagagcttatggtttgtgcgaatggctgctgtcctcgcatactgagctggagtcttgtgagacagggcctcttgtcctctgtgtttatgtggttagagaggggagctgacacatccttttaaagaaactgaaagggctgcttgttttaactctcactctgtgatgcattgcagagatccccaaggtatgattggaaatggaaacgtaaggacgggcacaaatactatgtatccagattttctttccaaccttgtagagctgggaattaaaaagaaaaacctcgcccaggggccacctgaactagaacctgcaaaacagacaagcagaaaggttgaattcttccaggcggtctcttccaccctcacctcctcctctgttatacaatttaattacaactttattcacttcagaaaccccatccattccttccagtaggggaagatctctctttccatagcaaggagccttggtgataagcagctatctgtaggaacggtgcatgggactctcaaaacctctcccttgacaagcaagaaagacatgagcaaataataactgaaattattttgacatttcactctggttgttgtagttttcataataaaggaagaacaaagtacttgcagctttaaataaagaggctgcctttggcattgatgtgggatttcactggggaattttttgtatgagttcttgtttttgctcactgggagagaaaagaaaacgataagccatgaaaagacaaaagtccaaggaaaggagaaagcaagacccctgtactttttcttgatagcatttgtcacccctggaatattgcggtcatcttagtatttattttttgtttcttgaagtctgctgctgcacttgactgtaaggtctatagggacaaagatggttttggattttgcttaccgttgcattaaatgtgaatgaatgaattcgtttacataatgtgtactaggagccaagccctgtgtgtgtgtgtgtgtgtgtgtgtgtgtgtgtgtgtgtgtctgtgtctgtgtctgtgtgtggtttttggtgatgtgatttttaattagatccttacaataatatggtgaagctactcatcattggtcccattaaacagaagcaaaaactagtgcttggagtatcacaataacttgtctaagattacacagccagtctgcaaaagagctggatttcaaaatcttccaagtcatcatcagttatggtatttttaagatcgatttgcagttaaccacacagctttattacaaattcatgctctcttgatgtactcacagtatttttcaaaatttacctattgctatctctctatctctttaaacttttttcatccatcctctgtctcttcccttttatccctgaatgtttgccctcccctcttaagaaaaaataagatagtagcaagctccctgctggattttataactttgcataccatatatttagtttagtaatgaaaaattccagctccaggcgatgcatagaatcgcatttctaatgttttttaaacagctattaatgtggtcgagcagtgggttttttttttttttcccttcctcctctatataatcatctgctcagtggtgcgctgtgaaactgagagtaggagccagaggaggagcaagctgtgattgatgggccaggccttcctggcagaaaaagtgccatctgggttggttttgggagcagtcagatgttgagggggaggtcagccaggcggcctcagccccccaccttcctcaacaccccgatcatccacacattgcacagcgcgcacaccctcgctcgtaattgaggcgtgcttggggcagatgctttgtggtgtgggacaagaacagctgctaagtttatggaggagaaaggaagcaggatggtgcagcaggtatttttgtttttttttccatttaatctttcactcaaaattgcgatttgaatgaagctgaaagcttttcttgtgttaagtccgtgctgtcggtgacacgtagcttgctgcttgaatcatgcccggggaaaggagaggagttttggtgaagagagtgtgtgtgtgtatgtgtgtctgtgtgtgtgtgtgtgtgtgtgtgggcgcgcgcgcacgcgcgcacgcgcgctttctgcttgatgtgtggaactgagctgatcttagaaccagcaggttaatggtgtccttttgcatttttcttctttgtttgaatgcccctagggcatgatgcagtttagctcaattcacttctgcacaagagggtttctctgaatatgcgcgatttcttgccagagaagtggtgtagaccatgctcctaaactaaagtaaaacaaactgtcagcaagactgaaaactgcaagcaaccatcaagaatggatagttttcctccagtgagtccatgctggtggggggtcccactgcaggagccgctgctttcctgggctgtgtgggcatatgtgatcagctggcttattaggttttgacaattcctgtgcatgtcttcattataagggttgagttaaggccagaggaggttctccacagcaggaaataaactggggacaagtaaattccagatgcagaaagggagggtgtgctcaagaagtttgactataaaggtggggaaatacaggtgtgtgagtgtgcacacacacatacccacacaggaaaatgcttgcctattttaaagtccacctggacggctacgaaagctggtactttgccttctcagtgaaagtcaggtagttacatggaaaagaatagacccatttcctgttcggccacttaaagattctttttcagttgaaatacggtttaccttcaattttgagccaaaaggttttgcaaaccctgactggctaccactcttgtttctcttgttagtttctcaaaactactttattaaaccactcagggcaacgaatgggagaagggcaatgtcttggggaaaaaacaacgacaacaacaaaactctctcatcttattttctctctgactctgtctcctgagtccacttcagagagaaaattcagggttcaggatatttcagggaccaaagaaattctctgagcatcagaagagtggccctcttattgcatgcatacaagagtcaacacactatgctaatagtcagattacagtgtttgtcttaaaatagcaatgatagccaggctatttcatgcttcagtaaaatatttaaattgaaatgacttttttttttgcttttatgaatcagacttggttgcattttaataatccttttgctcttggtaactggagtgaaagctacacgttggggtgtcttaagtaatgacaggtttccatcatcctgctgtcgttgagttgctctcgttgactgagaggtttggtgactgaggacaaggaagtttcttctctgtttatcctaataaatgttgtttatttcaagcttctagtcagttgtgcagcagcaatagtgggtcttaaagcgtgagatcttggccttctttcatcctccttttgtgtattgagcaacaactcaagaaagtccaggcactgaaattaaacgttaagtttgcaaaagctcctgaagcatttgcttgatgatgtggggaacacttgtgaggcagatcatcctgctcatcaactaggaacacccacaagcaccctgactctgcagatatcagaagctctctctgatcattccacttatttagggaaaggtgggggtttggcattggagtagaagaaagaaggcagcttctgcaaatgagggaatgtctagccagaatgctccaaataattttgcctgtcactgtcccctacatgaagttggcttcagcttccaacccaggagcctgttcgcgtgcctaggatttgctgtgacctggagtggaaaaggtgcccttaatgtcagtgtatttttccagaaaatacatttcagccaagctaagaatccaggaatgtcactagggaggaaacaaagacatctctggagccatttgaaggtgaaaaataattccataggaagtacaatggtcttaattaaatattagctgtaattagcctaaagtgcaaatgttgggaatattaattagggtctctctggaacggctgtcagtgttaataagtaactgtagggggtcccaccaacatctgtttgagaactccaggtacaggatgaaatctggagtcccatgttcctggatgctaactgcaggctccttggctaccatggactcagtccctagagcatggtgctctgtgtttgccagaattgcacaactcatggtagaggtgggtggcttgctttggcaccagtggtgcccccagctggcccttgcctttcctcggatagcctcaaggcatttcaaagtcaggcgtcaggcttgaggtagtgcagaagtttcccaggctgctgccccactcctttcgaatggtcacccacccaacctggccattggaattgctggcatatttgaatcaaataccctagtccctggcttcctcacagggagtaacacaccaacagctaaacacaggtccatggtgtgtgtgatagagagggaactgcttatttaaaaatgggaagtggacaggcgcggtggctcatgtctgtaatcccagcactttgggaggacaaggcagatggatcacttgaggccagcagttcgggaccagcctggccaacagtaaaacgccgtctctactaaaaatacaaaaaattagccagtcatcatggcgggtgcctgtaatcctagctactcaggaggctgaggcaggagaatcacttgaacctcggaggcggaggttgcagtgagccgagagcctaccattgcactccagcttgggtaacaggagcaaaactctgtgtcaaaaaaataaaaataaaaataatgaatgaatgaatgaatgaatgaagtgaactccccaccaggtgattctcttgctagatgagaaatgccttggtttaactcttggcttccctaacaactacctgtgactgtggcctcgaataattatttcccagctttggtctgcagcatctttgatgacaaggtaaattgagattagagatgcattgcatgaaaagtagggattctggaccttggcactattaacatttggggcgggacagtcttttgtggttcaaggtagtcgtatactctgtaagatgtttagcagcattcctggcctccacccactagatggcagtagcacatcctccctcatttgtgacaaaactgtctccagtcattgcctaatgtcctgtggggagcaatcacacctctgtaagaactaccggtatgaggcgcccagcacagtgcctgccacctattaggttttcttctgaggaccagtgaggagaaggggctgcttttcatggaagtctgaggccatcatgaaccttctgctcataagcccacttatgcagatttaaagcctgtgtgcctgtgagtttacaggtcaaagatctgcggatggaaagtaaattccccaaaagattctgacccactgtttttgcaccattttcaatattgccagtctccaagtctagctatcacccctctttggtttggagagtatacaggccctttctctctctttctacttcactgcctgctttatttcctgcccaaactacttatgcaataatggcttcttaactggtgatcccatatctaatgacattctgccacagctattagaaaacattttccacaaaggaccagatgatagatcattcagtcttggtgggctgggcagtctctgtcacagctatccaactctgcctttgtagtacaaaagcggctacagacagtaaacaaatgagcatgggtgtgttccaataaaactttatttacaaaaacaaaatttgggccaggtttgcctcatgagtcgtttgctaggtcctctcttcatccccctaccctatctcctgctgccagactaggctttacagagcccagaggtcatttttccagcacatattcacttggcaaacatttataaatgtccactttgcagctagtatgctgttggaccatggagatgggacagggaatgtggcacagtgtcctgttttcagggagctcacagacaaataatcaggctgtggcagtgcttggtgctgtgtgagctgtggccaccagctgcagtggagcagaggggatgggcaactgaccaggtttcagcatcaaggaaagcctgctggaggagggactcttgatgcggactgaaggaagagtaaggactagttgggcaagggggtaggtgaggctttccaagctgaggggcagtaaatgtgaagacttgatggggttgagaggatggagctcttctcccttaactgaccataagcttctggaaggcatgacccttctctcttcaatacagagatagctcgaagtctacaaggagccttagctcttttgcaagaactagtaggaatgggccacttttcctgagcttgctctgcactgatgaaaagccccagggttatatatgttcctggtgaaagtatattctgctggaggtggaggagggaaacctttgtcttcatatgatcattgtctgtaccactgcttatgtggttattctgtgcttccctgtaagagtttacacaagtctacctttcacttcagagatgggccaggtagaaggttggggaggcagaaacagatctttgagcagaagctgcctctggcacagtgaatttctcatcagatgattcccaagatcccaacatttctggggcttttcatcacccatagagaagtggcatcgctatgaaatttctgtacagaaggatatgttccttgaacagcccagaaaaagaaaagatgctagtttagttataaaacagcagaagtttttttttttttttaattagtcaagacccttttggttgtaagtaacagaaaaagtagcttaaaaaatgagacaaagggtacaaagtgtcagttttgcaagacagatacattctggagatttaagtacagcatggaaacaagagttaaaaatactgtattatatactggaagtgtgctaagaggatagatcttaaattaaatctctccacacacacatacacacacacacacacacacacacaaatggagatcatgtagaagtgatggatatgctaattacctggaatgtggtcacttcacaatgtatacatatgtcaaaacatcaagttatacaccttacatgtataatttttatgttaatggtatcttagtaaagctgttaaaatatgggacatttactgacttgtgtaactacaacaaacagggatggtgctgactgcgggtaaagctggattcaacacttcaaatgacgtcactgggactcagtagaaacctctctgttcctcagtttcttctcttcattttcctctaggttggcctcacgtgtagggaggtccccttcaagtggcagttcgttgttgttgttgttgttgttgttgttgagacggaatcttgctctgtggcccaggctggagtgcagtggtgcactctcagctcactgcaacttccacctcccacattcaagtggttctcctgcctcagtctccggagtagctaagattacaggcatgtgccaccatgcccggctaatttttgtatttttagtagaggcagggtttcaccatgttgcccagtctggtctcgaactcctgacctcaagtgatccacccaccttggcctcccaaagtgctggaattacaggcatgaggcaacatgcccaccctaagtgtcagttcttggcagctccaggcttatgatgtttttacagctgcccatcaccgtggaaagagaacttcttccccaaaactacagcaaaatcccagggtgactgggactcagtggtgtgactagggcttaacgcactaacggactcactagatagatgtgcatgaacgcaaatccatgggactatctcagtgggaccatctgattggccaggctgatgtcctatggctcatctcgtagcgactgggagctgggttcaactgtatctgcaccatacaggctgaaagtgggactgtcccccaaaaggaaactggggctttgttgaagaaacaggagtggagacagaccagcagtatcactgcatgtcttctttggcttcccaaggatggacaaggttaactgctcatggatagcaactcagcctcaacataggcacaccctccatggccccagtgctatgggaaaatgttagaaagagaaagaaatgctcgtgcccttttgtttccagtggcacagacatttggcgaaatttgtctggaggagggaagagcctgatgggaatgatttacttgtaaaatgtttaaacttatcctaagcttagttctcttccaagtgtcatctttaacattctaattaaggtcccttctaaacaaatgcaccagctccgtgtgctgctctgagaacaaactttttttttttcctctcttctttctgtcatcatgtttttgctgcactcaaattgctttagagaaagaggatttcggatgttggtggcaagtactgaagagataaggagaaattctgatatttttgccctagtatcattatatgagggccaaagtcacatctaattgaccacagacaataggagaggcagctatttggtgtgcctaattgctaagtttttttcctcgctctgtctttctgactgtgtgatcccatctcctgagaccatggaaagtttagacctttgggttacaatttcttatgccgtgtgtgtgtgtgtgtgtgtgtgtgtgtgtgtgtgtgtgtgtgtgtgtgttgtggtagaactgtggaggaggaggtaaagagagagagctgtttcctgaaatggaagcatttgtattcaggtttttgttgtgtgtgtttttaaaattcttctgagttggctgtaattgtcacactgcctgttttgcctagatctgaagaatgaattgttatataatactctgtgctcataaaaaaataaggcagggagggagaggcattgactaatgagactgagagttaaatccaatatttttcagaaatgcttaaaatggggatgtcagagaggacagtctttgtccaaattaggccctgaatttgtatcagctgcttcattttggcactggggacatcatacacgcatacacacacacagacacacacacacacacacacacaacataacacacaaccacacagacactgggaccattaaaaggatactccctattcccattatgtgagccaagtcacataaaactttgattaaattcaaatgcttacataaattgtctctcctctcaagaacacacacgttcaatttagtctctcttggcactttaagtatcaaatcaaggttctgctgtcactgcagacaactaaatgctcacagcttccaaaatgggaatgaaataaaaaggatctgccaaaaaaaaaaaaaaatcaatctagtaaagccacagaccctcatgtctttgaatattaggctgggtggcttggaaaaagcgactttatctttatctttccaagcctcggtttctgcatctgtaaaatggggagaagtgatggttactgtttccttatagggtctggtgaagatgacctgagattggtccatctcaggctggtggcaccatggtgacccctagaaagtacgcggggcacgatcgtcctgggatctgggaggaaggtttctgcatggtggctcctcatgacgttctctccctctctgcacctttttgatttttcagggtaatcaggaagcagccgctgcccctgacacaatggctcagccttacgcttcggcccagtttgctcccccgcagaacggtatccccgcggaatacacggcccctcatccccaccccgcgccagagtacacaggccagaccacggttcccgagcacacattaaacctgtaccctcccgcccagacgcactccgagcagagcccggcggacacgagcgctcagaccgtctctggcaccgccacagtaagtggacgtgtttgctacgggtgggaggttatggggaggcgcccccagccctggtaatggcagcgggggtgcacccccatctacccagggactctgggaaacagatcagtccctaagcccaccctcatcataccagcttcctgaagtttacctcatttccatgcattcattcttagcgttcatttaaatcaacggattattaattaatttcatttatttgtaaaggggcacatttatcaattttctattcctatagttttgcctttctagaatgtcatcccaatgaaatctcatttttttggaaaaaaaaaatttgatgtaagataatttttcttcaagtcttacggaggctgggtgtggtggctcatgcctgtgatcccagcactttgggaggccgagatgggagagtcgtttgaagacaggagttcgagaatagcctgggcaacaaagtgagacctcatctctacaagaaatttaaaatttagctgagtgtcatggtgcatgcctgtagtcccagctacttgggagactgaggtgggaggatggcttggggccaggagtttgaggctgcagtgagctaagattgctccactgaactccagcctaggtcacagagtgaaactctgtctctaaataaacaaaaataaagtctttgtggaattataatttacataccttaaaattagtatatttttaggtgtacagttcactgatttttagcatatttacggagttgtgcgatgattgccggatgcatctaatttcggaacatttccatcagcctaaatacaaatcttgtgcccctttgcagccactcctcattcatacctcagagctctgaacctcgcttctttaccttagcctaatacatttgagattcatccaggttgcggtgtttgtccctggtttcttcatttttattgctggaccaaagggcaggggctagaaagaggcagggtgagagaattttgatgaataagggaactgtcctgtatcttaatggtgacggttacatgactttatacgccataaagagtaaattttattgcgtacaaatgatgaaatggattagaaacaggcatgtaaacagaaacattttatcatcactgtaaatgaaaactggtgttttgatcattaatcaaatataactctaaatgaaaatatttatcataaaattaaataatgttcatttgtgtgccacctaaagtaatcatgcataccacaaaacctgtatggaacatgcatttgggaacctttttctgcagaattctttagaagcttgggaaccccaatcctgtcgtctggaacattttttgagtgtaaggcaattctgcctcttcgtcctgtcccaagacctcaggaaagcaagtatttgtgaaggagtttatggctttgaagcatgatacatttcctgtgataaaagaaaacactgactaactttgctacttgccacctcattcatttggaggctagttttgacgttttgtttttgtttttgtttttgtttttttgagatggggtctcactctgttgcccaggctggagtgcggtggcgcgatctcggctcactgcaagctccacctcccaggttcacgccattctcctgcctcagtctcccgagtagctgggactacaggcacccgccaccatgtccggctaattttttgtatttttggtagagacgggatttcactgtgttatccaggatgatctcaatctcctgacctcgcgatctgcctgtctcggcctcccaaagtgctgggattacaggcgtgagccaccgcgcccggcctagttttgaagattttttaaaaaaatggtatacattctgaaatttttagttgccttcctccctttttaatttattgtggtaaaatacatataacataaaacttaaccattttaatcctgtacacatttcaatagcattcagtgtattcacaatgtagtgcaaaaccaccaccattatctagtttgagaatgttcctagcaccccaaaaggaaaccccatacccactaagcagacactccccattctccctctccccggcccctggcaaccaccaatctgccttggagatagctttttgtgtctggcttctttctcttaacacgatgttgtctaggttcattcatgtggagtaccccactgtatggatagaccgtgtttatttattcattagtccattgatggatatttgggttgtctccacattctggttcttctgaacactcctgctgccgacttttttgtatttagttgctgtgccttaggcatgggccttttaaatgagtttgctggttcagcaggtgtttgttgcttttgcgctgactaccaggtagtagtgatggggatgttgtttactgtttgttggctattttgtgacaattaatagtagtaatgcctggataggttattttcagattttgaaaaaagatccaatcagacattatttattaagctaactgctgtggaaattttacgtattcatttatttattcacaaatatttattaagcttctattagggccaggattcatactagctgccatggttgaacaaaacaaaatgatctttacctcttgtaacttagtatgagaggcagaaactgagcatgtggcaaatagcatgtgtgatagatgtcttaaggaaaatatgggtaccgtaggaaaattaaaaaagaacagaggtgctacctgcaaacgtgtagtctgagagcatttcttcaaggagatgatgcttaaggtggtaagacaaagcagcccaggcagagggaataccacagtcagaggtcttaaagttggaaagatctgggctcactcaaagtcctaagaagaggccagtatgttttgggcatgatgaaggggatttggaggtgatgtggcaaaagatgaaccgggaggaattagcagggatttgacatcctacagacctggtgggtccaataaggagttgaaattccacgttataagcaatgggaaaccattaaaaagagtttaagccagaagagttatgaaatgagacataaaaagaaagggttagtgatgcctagcttaaaggaaatttaatctagttggggagctgagatgctccacatctttgccctgcaaaaagaacactttagagatcaacacaattgaatttaaatagcgtgttgggtgtccacagtgccccaggcactgcagcaagataatctgatgtgcagacaagctctctttccttggagagccttaggagaatataggatttgttttctgttaattatgataacgtgccaaattctagcatatagattttcacaggttttatctatcataatgacagtaggagaaaacattttcaaaatcatagtcagagggttatacctttcagagacttctggttacaggaaagagaaaactcagtaggaagcatgttggcccatacaataaaaagtccaggcggagggtggacacagcctggtttttggaacgtgtccatcagcttctaatgggaaaccatcctgagttggcttcctcgtcctcacctcagctctctggctctgtcctgcaagttcaggctccagtcaccacctgtgaaaagctcttggattcatcccatataagccctctcgtgggaatcaatctccattcctggcttgtgtggtgttatcttcattcagtggctgaggctggtactgagtgtcccagccctggggtcactgaggagcttcatatccaaatacatggaatgaagaccatttcatcagagttcatgatgagatgccttcagaataaatcattaaagaaacgaagtagacagaatcttgtccgagctaaaggtagcatggtgaaccttttgtacaaagaagcttgaattggtgttaatcaagagtagggagtgaagagaaagacaaggacagaacattggagagctcacggggtggggtttgaaggaagaggaactattgagtaagacatcaatgggatgttcagattgggcattcaaccagttgaatgttgggctatacagcctggagggtataaactgagaagacattattgaagtgacagtttggatgtctttaaagacctagaagacaatagttttgctagagtagtggagagagatgcagaagggacaagagttgaggaataactgtgatatgttggagtgggtgggcattgcccgttataaatatttggagtgatgaggagaaagaagagattgcatctgagaagcaaagaagtcagagaaagcagttggtaggatagttgatttagattcaactaatttatgccaacaaggtccctacgtggggcacaaaagacaggaagcaagagatagggaataatggtgcaggaaagaaagtgatgaagtgttttataggcgataagaaggaataggatcaagagtattcagaaatagtaggtagtctaggaaaaaagaaaccactttttaacagctttgttgacatacaataaactgtatatatttaaagtatacactttgatacatttttacaaatgtacctgcatgcacaaccattactgctatccagataatgaatctgtccattatctcaaagtcttttcttgctcttttttgatcctcccctcctcctccttgcctcatccccagggaaccagtgggtctgcttcttttgctatagcttaatttgcagtttctagaattttatatcagtaacctcaaacattatgtgctctctttgtctggcttcttttactcagtatcattatttttagattcatccatattgttgcatgtggttgtagctccttccttttcattgctgagtactgtttctgcatggatatgccacagtttatttctccatttacctacacatgggcatttgggttgtttttcattttgggtaatggagaaataaatctgctgacatttggaagtacttcaattttgaaacagaagagaaggaagggtgaatgtgtgaggatgcagagaaattttcaagtcaagagataatgtgaggagttccatctacattgccttcattttttccatgaatggaggcagcatcatcaaaggaaggattcctgaacttgggcaaacatgtcagaaatctgccttagataattcctagagtatttgaatggcaatggatgcccgaatttggagaatgtaaatgtatggtggaccggttagctgtctactctgtcttctccagcaatgtttggatggtacacactcttagaggtaggattttaaaggaaagacagccattaggggctgaagcaggtgggctttggggctgatcctgaaggaagttttaagacttatattctgaactggtattgggtaagtgcgggaatcataaaggggctgtctcgttttttgttacaaacaattacatctgtatactcatctctctttggccaaaaaggagatgtgacttttcagttatcctttcctgatctacaccagcagaacgtggtctatgacaagtttacttcaaattgtctctgcctcctcctacatttatggggtgtaccttgtcttcactccaggttctgaatttcctgtggaacgaatttaacctcaaagtgggtcagaactatggttctccccaccctatatccatgaccctgtatttgcacaaaaagttactattgtgagatacctaggtcattccccataggatagtgctgtacctggaatagctctaactcttctttgacatatgtatccacgatgcttaatatcattctaaggacatcgtagaggccattatttctttgagaaactaagtacttttgggtaagagaaaccagccatccatctggtggcctccaagaacatctaatatatgcacatgatttaacacaaagtgcagaatctgtaaaagggaaggaggatgcacccagagctcccaaccagagctcagtaaaatgcagacagaaaagacttaccaggtcatccttttagttccccacaggctgagatgagtccctgcaggcctttttttctgctgaatttctatttcatgtaggcctccaaacatatcacggatcacattgctgacagagccaatactgtattatgttagatactgttcctgacaaggtattttactcttgacatattatcattagagatttgcaagtggtgaattctccatgtatctccaacagcaacttaacttctatttttaacgcttctgcagtctgttgaaacggctcccaccactttcccactagctctaggccctgattggagaaggaatgtgggtgccccagctaggttcctgagctggaggctctactgacagggaaaagaactatttagagagccaggttcttctttggcctcagccgcttcccactgaagtgttaactgcgcctccaaatttccttaatacttttaggaagataaggtattggttggtgatggtgtcctgttcttaaccctttccatgccagttctgattttgaagctgatggaatcactaaggtataggaaaaacttgttcagggcattccttttgactaactagctattattattatcatcatcaaagcaattcaggcttggggtttaaaaagccagacattggaaaaggatataaaatgaaaactaacatgtcctaatacccacaacccaaattcttagtctctgtgccagaaatgagttactaataccttatatttccttccagaagtgttttatgcaaatgcaagcatatgcctgcttgtcctctatctctatctttatctccctctatctctatcatctgtctctaattcaatctttatatcttataagtactcactatttccattctcaaaattacagaattgaaatctaaacacctactttggcacctgctttatatctcagagattattctgtatcatatttaggggttcagtcattattttgtgtgtgtgtgtgtgtgcatttttatgtacagaagtatcctaatgatggaatttaggttgtctctgggtttaatcttgcactgttgatatttaccatcaggctacagtacagagctaggtacaaagattgctctccatctctgtttgcctctgggtgtgaatggctaaaaggtacatggacttaagatgtggacattgatcaattaccctacagagagcttgcaccgatttgcaccctcatggacagaacctaagaaggcctgacacccacacccttgcccaacccaatgtgctagccaactcttggctcatgtccctgcggactctgtgtgtttgggtgtggctttccccctctctgacaaaagaaagtacttttagaattgttgggtgtcctggagaagaaaaattgaggtgtgctgccattgcttgaggcctcctgtggtccaaagatcatgctaggccctcttttggtcgccatcttgttttgttacatcaaccttttgaatgctgttagaatcccaccaataaagggagaaagaggttgaagatgttttgagttgggaatggtgcagttgaggtcgtcacccacatcttgtctgcctgatgttaaagtccaggctgtttccccagtctccagctgtcttctaaaataggggtacccaactcccaggccacagatcagtactggtctgtagcctgttgggaactgagctgcacagcaaaaggtgagtggtggatgagtgagcattaccactttagctctgcctcctgtcagatcaacaatggcattagattctcagagaagcgtgaaccctattgtgaactgtacatgcgagggatctagattgtgtgctccttatgagaatctaatgcttgattatctgaggtgcaaccatttcatcctgaaaccatcctccctgccccactgtgtccatggaaaaattgtcttccacaaaactggtaccaaaaattttggggactgctgccctagaggatctcttgaccaatggcttagaattctcatgaagattggtttcttcgtggctgccctctagcttagacaaacaggtcagttaaggcctggcctctggacttgacaagatttgaccctccattctgcttacaagcggaaggagctcaagctgaccattgaacctctctgctcttattttttctataactcccttcctcagctgtgacccttctccagatctcctcccttttttcttctaaacaactatcagacgatggattacagaacaacagagttcttttcctttgaggagggtttacgcctcatgtacttacattgaaagtttggcaaaataattgaaggttgccgtctaaaaatagggtgaatagttacatcgaaatgagaatcaggaaaaagtctcaaaaatcataacttttgctcattgactgtcagactatattttaagcactttccatgcacaatctcaactaatcttggccctccccaccacgtatgaagtgttatcgtcccatgttacagaagcagaatctaaggcaaatcacttactgaaggtcactgtggctgagaagcaggagtcagagctcaaaaacaggcatgtcagaccaaaattcttaagggctggaagcccagaaggcatcccccaggcatgcccagccacactggcctcttttctaaataggttgctgttgcagaaaggaattactcatttcaccctggggagggccccagcagacccaagcctgtgcaacattacagacttcgagtgtgctcttgtttgagacctgcgccttgagcaaactccaataacatgtttcggtggcttcaaaattgtcttttcggatgacagtgtgactgagctgttttgtcaataccagttctattttcctaaaattcacatttaatttgaagacatgggtactgtctcttgtttccttaggagcctgagcactatgcttctcactcccatgtattctctgcaatacatggcccttggctttcaggataaactaaagacctttattacccaatactgtgcctgttttattattttaaagaccctggtcatcaaaaactgtctagtcctggagagccaaaatgaatgatttatcccaacttaggataacttggccaggaacaggatatctctgagcatcaaagacccatgtgtttgacgttcttttttggactggggtttcagcctcggattttggcagaattggaggttgttatgacaggtgaaaaaaaatggcgttggttaaatatctttagatattatcgggagaagcagagtagaatctaggtacagagcttgacattttcattcccattctgtctgacccagagtgggaccataggcacgttacataacttctctgagcctgttcttttttatatgtgaggcttagagttgttgtgaaatcctaatacagtaatgtctatgaaggtcttagcacaatgacaaacacatagtaaacattctaccagatcgaccatcctaattatgaaataattacagtacccataatgagaaatcagagcggtctccttggttccgagttcttcattaaaaatgttttatccaggagaatacattcatcataagaattgtgaaatttcccgtttcaagtgccaaactaaaactccaattccgagatttattttaaaggtaattttgtatttaatgatttatagacaaatggttttcaatcactcatgttttagtacaaactatcagtacaagctgttcttggtctaagtctaggtcgtgggcaaacaaagtgagattcattagagaaggaaatgactgaagttttgtttttaagacccaaggacatcttgcttttgctaaatgaggaatgctcaggcatattctaagggtttgatttaatgtttccttagggggcttcactggcttatttccattgcaaatattagagccatctgacaagtttcatcgtgactttgtcctcatttggtgctttgtgcttattcacacctgtatttattgtcatcagtttacccactcaggatgactaagcagtctctatctttatttttggttaggtccttcaaacacccaaatccatcctttctgtagctcatagagactgctagacaaaggactgatgtaagtgtttgaaggacctaattccctctgcatagctgattgccccattaagcaattttattttatttatttatttatgtgagagaggggtctcactccatcacccaggctggagtgctatggcaccatcttagttcactgcagcctgaaactcctggggctccagtgatcctcctgcctcaatagcagggtactgagctcagtagctcagtactgcctcctgagtagctgggactacaggtgttttccagtgaacttagaaataggcattaatctattttgtgggcagtatttgggtcatgcattagtcaacagtcattttatgcccttaattcatggtcatatagtctttaggtgcatagtaagttcctatgaattccatgcaatttttgaattcaaggctggaaaaagaagttggctattctctgttgacagaagtttcaggaatggctcagccagaaccttgcaatgctagagctgggagagccaaagagttcatctacgctatcttctcgttgcacatatttaaaaagatcacataagttatgggttggaaacggaaggccaggcacagtggctcacatctgtaatcccagcactttgggaggccaaagcagatggatcacttgaggccagtgattcaagaccagcctggtcaacatggtgaaaccctgtctcgacacaaaaagtacaaaaattagccaggcgtggtggcgggcacttgtcatccccactgctcgggaggctgaggcagaagaattgcttgaacctgggaggcggagcttacagtgagctgagatcatgccaccacactccaccctgagtgacagaatcagactctgtctcaaaaacaacaacaacaagaagaaaaagaaaactcaaatactttcacatccaggcaagtaacatccatgcttagagagattaacttatgttggagacattggcaaaataaatttttagttttctccattaaggtaggcattacaaaattacaagcgtgatggtatgcaaccctttggtggggaccctgtagtaatttagcaaacaaatttcctgtccacaggatgtggtccctatccatccatccaatcattgctattttggattgttaaaccactattataatttcattgacatatttccactgcaaatgtttagatttctttcttcttaagaatagcagcaatttttatttttctgggttctcctgttcactactattttattcatttttgttatctgtccagcctctgaagatactgaatttacaacttctgacttaatcttggaaactcaagaggtgaatttaggctgggcatggtagctcacgcatgtaatcccagcactttgggaggctgagacgggcagatcacttgaggtcaggagttcgagaccagcctagtcaacctagtgaaaccccgtctctcctaaaaatacaaaaattagccaggcatggtggcgggcacctgtaatcccagctacttgggaggcggaggcaggagaatcacttgaatgcaggaggcggaggttgcagtgagctgagatcatgccactgcactctagcctggaaaacagagtcagactccatctcaaaaaaaaaaaaaaaagtgaatttaggaacctgaaccctttaagggagactgtatttcaggttcataaaagagacagcttggatgcttcagtgtgacagtgcagagattcatagaatgttagagcttgagatgactatcttatcttcctgcttcatttacgaatgatgctcaggttcagagacagaaagtgacctgcctgagtcacacagtgagtatcacagcagaacccaatgtaaggatgtcctaagagaaaactcccactgtaccatgcccttcctctgtccatctcctggattctacagccatttttaaaatacacatacccggggttatctctgcattgaaatagacaaagtcccaatgacactgcctttagaagcacgctgagctgtacactgtaagtctctgtttctctttgctatcctattttggttcctagccagaggtttcagccacaagtgggccttattctcacaaagacttccagacttcttaaaaaaaaaaaaaaagtcttcattttatctagttctctcctgctgctcctggtggttgtatcaatgggtctgtgtgaattcagcaatgtcatgcgttcctgccagctccagtcccaatcattacttctgggtcaggacactaaccagggggtctgggtttcttcctttgtatccccgaagaatgtggagcctgccaaattgtcaaattatagcatttgatgtagagctaggtccaagtgactgtacaatctctgcaggagttcagaagctggcttctgcccctggtagaaacataaccagactctcaagagacagtaagccagacagtctggagatccagggagatgctcatgggttctctggcttctgggccatggggagaaagtcatcaccacccagaaaataagccttcaccctgacagcagcagcagaatgtacctgggcttgaggacctgacttgcatgccatctcagtgtccttaggacagaagttccacgggcaagttctttcagcagtaaaccaaggttttcagcctgtaccactcaaaacaaaccagaccatcaggaccagttaatgtgaaggcttaaatgttgcagatttgttttgaaagtgaaaaggcaattttcttgtaaaaataaaaaaaaatatgtagagttgcaaatcatacaatccaaacaatatgggctgccctgatcttttaaaagggagaaatgtaaatgcccattctgattgtcagatgaggaacatcaaatagaaacttcttgggctgaaaggaagttacaaaagaggaagcagcgatcatttatggataacgtatggtaatgatcactagcatttagtgagctcatactgggtacccagtggaaatggtactaccagctttctgtggacaatcagattgaatttttacagcatccagaagaggcagggactataattaaccccttatggcctagatgagaaaaccagaacatagagaaatcaaggatgttgcccaaggtcacaaggctgataagggcagagatgggattcaaaggcagccacggtccactgtcttacccagtccatgctggggtcttccatgagccatgcactatgttgtgtatttcattgacataactcatcaagaaataggtgtgatcataccacgattacggatgagggaactgaggcacaggtatgaagcaaatgtaaacataggcctggcagattccaaaacccattttgtgtgattaccccgttagtagtttattttacctaaatgacattccctgctaactatttcaattatgataatatcattacaggcaaatatcttaacaatcctgcaagtctgtagagctctcaactccctcaatttatacaactaaacccacacacatccttcccatccctaacccatccccttccccagtggcatccagtggccccatagagtgaaagaggccttcataccatttggcaagctcacaagaggaagcctggatttcccagagaaacttgctacaaggaaattgctataattataacccaaattgtatttgacttctgcatttttgctttatattgttacactataatttaaatagattgttctctggccttttttagggggagaaactagctaccttttttttttttttcactaagaaaagcaacggtaggtgtagcattccaatgacaggaggtgggtttcgtcccccctcttccctctaattggcttgcaagtgggagttgggttagcagttatgccgggagttgcctggggttccaggcggtgacattcatctggtggctccacaaaaggggaagagacaacagtgggtggcgccagcttcggggagatgagccccagagagtttctgtgactccagaaggcagatgttggggacgaggggagatagggtatattaatcattggatttgggaatttttcctcttttgagacattgaagctcttgacagagaagaccagaggggacctaggaaaagggaggacgtgagttggatgcgcaccctggaatacagggcgttggccatctttctccttgcctagtctagctgtggatggggcccagagccccttagcagctcttccttttctctcttctctccagccttctccaggcttttaacatcagcagaagtagcaaggctaggagttggcaaactgtagctcgtgggccgattcctgcctgcgatgtttttgtcaataaagttttattggaacacagtcacactaactggttcacatattgcctatggctgcttttgcatgatgacagcaactttgagtaattgtgacagagctcgatggcccacagagccaaaattatgcttattgtttgaccctcaacagaaaaagtttggcaacccccgatctaggccaaagtgtacatattgttggcctgctggctgcattcaggcatcgggccattttattggactcacattaattaattgcctgcattgtaaaatggaagttttcacaaaataagctggctttgattaaaaaatggaaaaatctaacaaaacatggcagctaatgttggggatgtgtcatccgtcccctctgactatttgtcatagtcgccagcactgcctgtagggttttaccaagtgtacccttttacctgcatggactggtcctcataggcacttgagtatgatactctttcaggtcgtctgggttgtttttaataaaagatttggtatttcttactggactgatgaattacattttaaaaattctttccatcaaactggacttccctgtggaactccagaaagaaaatgaaaaatgtgtttgtgtaatgccagaatttagtgactgccagagttgttatatcagaaatacaacattttcttccaccttgaaacacccatacacatacacacagccctgcattttttaaaaaaaaaatcctttaaaattgagacctatgtcactgcagatgcttcttgacttatgatggggctatgtcccaataaatccatcacaagttgaaaatgcatttaatacacttcccctactgaacatcatcacttagcctagcacaacttaaagatacacagaacacttgtatgagcctacagatgggcaaaatcatctaacacaaagcctcttttatactgaagtgtcaaatatctcatgcactttattatgtactgtactgaaaggaaaaacagaatggttgtatgggcactcaaagcatgatttctactgaatgtgtattgtttccacatcattaagttgaaatatcgtaagttaggaatcatctgtactgaccttgatttaaacaaaagcaggattagtaaatactacattcttcttcagtcaaagaatgagtttctcagttgttattattaatagagcaagtaataatggtgttgggcaatatattaatgatttaagtcaattaattctaaaaccaatggtgggcgatgttacctcattttaaagataaggaaaagagactctaaacggttgtgtaaattgttccaaatagtggcaccaggaagtgatagacatggaactcagatccagccctgattcatgtcaaaggtcccaacgttttttttcttttttttttttttttggacatgcagtttcactcttgttgcccaggctggagtgcagtggctcgatctcggctcactgcagcctccacctcccaggttcaggcgattctcctgcctcagcctcctgaatagctgggattacaggcacccatcaccacacccagttaatttttttttttgtatttttagtagagatggggtttcaccatgttagccaggctggtctcgaactcctggcctcaggtgatccgcccgtctcagcctaccaaagtgctgggattacaggcatgaaccacagtgcacggccaccacagcaactctttaaacactgaggacacacaatagagccaatgattaactaaaataggcaactgatgcctttctctgaagcttacgtgtagaatacggtaagccccaggataacttcccctgtagctagaataactgatcccaggaagagcccctggaagcccgattcgatccactgaaagtcagttttgggtaaagtcgttagtgcgtcttctgttgttctcagcaaatcttcagacaattttttcaccaggctcagcagagggagaactaagtctaatgtatttagccgggggaatgacaggtttccttttcacagtaagggttcctaggataggagactatccactcgtagcagaagaaaatcctaatgagcaggatccaggttttagggggcccttaattctaacacacagttcaccctgggctgctcaaacgtcttgacttgccccgctatgtgtgtgtgtggctttaggaagccctgcgattttccttctttagctcgaatgtcaagcgctgcaggctttctgagaattcagtgtcctgacactggggctgagcccttggtaatgacactgtagacacgaggtaattacagctctgttaactcccaagtcaggctaagtggacctctgattattattctgagtataataggagcataactaacattgaagggaaattgtacttctctcttttattaaccgcttttatattcccttgtgcatggctatgatgctatgaaatctccttaaatgtgatattcctcaatataatacaataataatgcacacaccgtaatgtattggattactttgcaaacagcccttatgaaattgcatttcccatcatttccctgggccagctcagggctgctgggcttacgggccctttctgtagctgggagcctggaatctgccttcacggtcacttagggtttcatggatgtgagcaattggtccacaccatttttattcacagcgaggatgttggccaaccaagtttccagacatctcgctggacattgcgactcagagatgcaaacagtgtttgatacctcagcatagtttgaaaataaactgggctagatggtgtcaggaaggaagctagatacagggaagggaggccttccatgctggaattaaattgtgaagtcttttccactgactttgctggagagtctatcagatctttgttcctttgtaaactctttcctgacaccacctcaaaactagagttggttcttcctttgtatgttttatatgttttgaaaatccacccttagtttggcatcccaaaatacttactgaactcctactatgtatcacacatacattaatctactaaatacacatgaacaattttacaaccacttaaaatttaatatttggcataaagctataaactttttgagggtaccactgtgccttattcatcacttttattctcagtgttaggcaaagtgcctggaacaaagtagatactcaataattgtgtattgttcatttattcctgaatatttcttgggttcttactatttgagaggcgcagaactgggccttggagatacaagagtgaataagacagacatagcttctccttcaaggaatgtacagtctaccgtaacacagaatacacacacacgtcactcacacagttgaatgcagccagccatctgtatccaccaggttcgacatcccatggaaataagaaaacactgtttcttccatctgcaattggttgaatctgtggatgtggatctcgtggaaaggagagctgactgtaattacatttgcaaaaacttctgtgaaggaaaggtagagggtgatgtgcaaacaagcaacagggagacataaatcaaagcggagatgcattcaagacttccttaaagaagtgacttttaacatgaaaattagaggctgggcgcggtggctcatgcctgtattcccagtactttgggaggccaaggtgggtggatctcttgaggcaaggagttcaagaccagcctggccaaaatggtaaaaccctgtgtctactaaaaatacaaaaattagccaggtgtggtgctgcacacctgtaatctcagctactcaggaggctgagacaagagaatcgcttgaactcaggaggcggaggttgcagtgagccaagatggcaccactgcactccagcctgggcaacacagtgagacttcgtctcaaaaaaataataataattaataaataaaagaaagacatgcagagaaaggtgggtggatgtcctgggtaggacagacagcagatgtggaaacaagatgcaggggcgtgtggaagccagctcttaatggcctgtgattgtcgattgtatatgtctctttccaacaggacagggatgccatggtagtagcttgttacctccagggtgagagtatttacactatgggcattggcaatgctacagatgagggcttttctgtctgcttttctggagagctggttgttgatcagttaccagcactccagtgacagaaaggaagttggcatattcctgtgacaggatgaatatcagtgtagctgtgtggacgggcagggggatggtggcccaagttgaggataaacaggtgagcaagaaacactcatacagagccctgctggcctcatctgggggctttgtaccatgggaggccattgaaggattttaagcagaaagaatcccatcattaggtttgattttgggaatgatctgaccaccatgtggacagtggattggagaaaagcaataatggtgttgggaagtggcagaaaggactgccagtaagctcttgccatgggctggatgagagatgttgataggaactagaatggtctggaacatgggttggagtcaatatcaaatgaccaaataatctgccagagctctctgtaatatacagtattcacacctgtggacttttgtgacaatttgggacggtatagtcccttgtaatttaattctgagagtgaccattgaggatgtgatgatgctctctttacagtgaggaaactgaggcgtggtcagttgatgtgactcagtgtgttccctgaggtcatagctgaacaagtctgacttagtaatatgtctgactctagacctacacttataaccacaacttcacactctttttgctgccaccttcttctaaggggctggaagaatggagatgccactgagctgggggtgaagacatcgtaaaaagatctacctggttctatgagatgcatccatcctgaccttgccaagggaagtaggaatcaggaaatggtggcttctaacgtgatttcatccaggcccttatgcttgggtccatctcaggaatagtgtttggaattaacgcaggagccagagactaagcaaaccccgcctccaccccagtgcagatttcagttgaatgcagactagagcctttgaaaattatgcattggaaaacaattctggataaattaatttccatcatacataatgcatgaggggaaatccgtggtatttttaaacaatggaaatgagagaatctgccttttgggcattgatcccaattaaatttatttcagcaaacatttatcaacacctactgtgtgccaggttcttactggaaaacagagatgagtcagacattgtctgtgcccggaaagagtgagaaatcaatggaggtacccgcagagtgatcagctctgggttagaccttgagactgggagacaaagagttgtgagtattgccctggagggacatacatcctagtagaggagaacgaggacctgccagaagatctgagagtgagagtttgttgaggaaggctatctcgtgcctgggcttcacttgaatggttttctttcatgagtccttccgccatcaataagatccttatttaaagcctcctattgtccagcaatggtatgtgctgtccatctgccccattagcccatagctgctactattatgctacttttcctatggtgtccactgttattactgccacaactacctcaacttactgttgaggaaaatgtaattctcctcaacttctattactattatagtgttgctgttattttatttaatgatagatcatacattcgaaattatttgttgagtgcttactgtgtaactggcaccgaagattgaggaacagataaaaaatagctatggtttcttcgtttagaatgttatcttgtaggagagagagatggaaacaaataaacaatgtaactaaataattacaaattgtaatgtttgcttcagttatgcattgctgcctaacaaactaccccaaacaaacattttatttacttacaattctatgcttcaggtatttgggtgaagtttagctgtagagatcagcttggtacatataccacttggaactggggagtaagttccaaggtttcccacagatgtctggaacttggtgattgtctgtacaacacatctcctcccccgcacccccacccccaccccgccactcaatctctccacaagactagcttgagcttcctcacagcatggagttctatggtcaatgagactttcatatgggcatcatcttggcatgtacacacttcagtggtggctgaattcgaaaaaggtgtgtctcaagaaatgagagtagaagctgcatatctgataaagctcagccttggcatttgctatgtgctatgtctgcctcagtctgttgattaaaataaggtcatctcagattcaaggagaggggaaaagactccacctttgactaggagatatgacaaagaatgtgaaaccgtcttgagtccaccatgatactttttgaagaaaacacatattaggttgaaaaagagaagattaaggagggagggacatgagatcagggaagccttctctgaggaagggtcggttaagctgtgttctgaaggatgggagagtccagcaagagaagacagtgggagcagcattccaggaagagtgaagagtatgtgcaaagccaggtgtccctcatctctctctattcccagtgcagcttcctcaccactccccaaccaaataggagtctcttcttgtaggtggaacacgggataatataaagagcgtatttttgcacatctgagaagcccaggtgacatattgtccatgatctgaagcaacagataatgtgtttcctcatgtatttcccaatgggatcacccaaagtaacatgcttaaatggatgagttgtaatcttctacatagaggtgatgccaccaggcattggtgatccagataaatgaaatgcaggaataaggataccgagactgtttctggccacaaaggaccaggcagagtagtctattgcttggcgaccaagtgcatgatagcactgggcttcctgcttctgccctccccagtgaacttcagatgaggcttgggagatgaaagacgagagaggagtcattatcagaatggtaagaatatagcatccagatagatgagaagagacaaaaagataactccgtccccatactggcttatttctcctttatggagaaggcagccccttggaggtaggcatttcctgggttcaaatcccaacgttgccctttattcactgcatgactttgggaaagctattgaacctcactaagccctaaagcatagaaggtgccctataaattgtagctgccactacttctattattatcatgtatgtcattattgctactgctttgcagaaagacatgtgcctcattggtggtgggattcttctaacccccgtctcctcctttcaaaggctcactctgctactttagagttatcttttatagtgtactcccaagcttgcgatgttgcttccctgcctgtaccattttgttttctccagatctcgctgtttccctcgctggaaactccttggtctctgactgtagcaatatgtttaataactcaaggtacctgaaaataatgcaatatggcaccatgtcggcaatgtggctgagagagtggctcctgtacagattgcctgacttcacatccaggctccctcaggtgttacccatgcaagacttggcaagtaacacaactactctgtgttatttatcatcagttatacaattaggataattaaagtgtttgtcacagagggtagttatgaagacaacacatgtcaatgattgcagagttcttagcctggtgccaggtttatacaacacatctgatgatcactgactgctctgtctctgctgtctctatggttgttgtcatggacataaaagatgtccgtaaacctgctcatgatagtcatgacctcttcaggcttaaccgttagtacttctggttgtctcttcttgaatgagaaataaggagatcaataattaaacacctatgagattcttcaccgaagggagttcatgttgtcatcccagcactcatgctaggcttgtaggaatgtttctgttttgcagatttaagaaacctaaggctcagagaagtcttatcactttccttaaaccctaaactcctcatgtggccaaggctggattcatcccaacaccatttaccactaaaacctgtgtcttctagggaccttagtttgatgaccctggttaattcagtgcattgaaggtttagctctctcagaggttcaagtgagagacacattagatacctccctgcccaagacccagaatgtttccttttagaagcacccctaaccacacacctggaaatccaaggcttgtgcagtttatagacgctgcttttcgcccctgactgctgtatgtaccttgagcagcaagataattcactctaattactcagaatacatatttaaggacaagcacaaagaactcttagtgaggcttaaaaataagccattcagcaaaattgcacaaggtgcattccctcagaaggaagagtttattgcttctaaaagtgagtgtctaccctttgttggctgcaaatgtgaggcaaaggaccagctccacgtgaagcagcattttcctctttcagatttacctccagaaggagctccactgataggagattgctcctttctgctatgacatcttctgcgtcaaaggatctcattagtgtttgtttttatcaggtttttttttttcccgacttttatctcactcagagtgaattcagtgttcactgtcatttacaggataggaaatatatgtccgtttgcattgaaaatcctgcttattccatctagactgtcccagataccactgtattcatgtaggtttggtgttttgtctttcatctatttctgaaatcaaaattttgttaaaaatgtttcgggaaagctcaaaagaattggcccattggaatggagtgaatgcaggctttctccatgcaagcagccatgctttcctagtcattaaccacctgggccttgggcctgtcatgttttttgagtctctgtttcttcctctggcaaatgattttgatgggtgtcatgaggatgaagtgggatgatgtgaaggacttggggtgcttaagaaatctcccaggccattcacaagccacatgcctgcaaagaagtcttgggtgagcagatgccaagtttcccagcaaagagatttctaaggtgcagtgcttcagcttgacattagagagatggccttggccggcagctgaggttttccttctcttttgacctgagctgggaagaagtgtgggtactggcagctttcgtgggggtacctctaaaatagagcagcagttccctgttaggaatggcagatgagattgtgatgaatgcaacaagggctggagcacagaacattctgaacggactattactccctcaaccctatgggctacctgggccagagagatatacacagagaagactggtcaaaggggaaagaaaataattccttttaaatatctaggcaagcagccaacctcctctgatacagggacctgtgacaaagacagacttggagcatgtaacttgtgtttgaaagcatacgccagacccgtaacttcctcttgactttccaccccacctcttctggattacccgggtctgcaggtgaaattccagttgatttacccaaacgggtgcaagtgcagaggaaggagaacatggggaaagaggcaaaataaattttaaaaacagagagatagaaagaaagagaagacatgaagggcgaaggaaggggaaagagaaacagaaaaaggagatagaaatagagggatggggccgggtgcagtggctcacacctgtaatcccagcactttgggaggccaaggcgggtggatcacttgaagccaggagtttgagactagcctggccaacatggtgaaaccctgtctctactaaaaatgaaaaaaaaaaaaaaaaaaaaagccaggcatggtggcacgcacctgtaatcccagctactcgggtggctgaggcatgagaatcaattgaacctgggaggcaagactgtctgaggaaaaaaaaaatagaggaacagaggggagagagaaggagagggagaaagagggaaagggaaggatctagctaggcacacataattgttgtcttcctaaaaacaccaccaccaccccacacatacaaacaagaaaggcaagtgacattacaactataggtactgacatttgaggctgtgtggccctgtccaccgctctaggttgcatctcagtgaatgttccaggttctgaacaatcctataggtgggggaaagaggttaggtggaccaagcatggtactgtggcagcacctccttctcctactgtttctgcaccccgccatgcatttaaatcactcagggttggtgtttaacagacacaactcctgagctactgaatcaaagccttagggaatggccaatgggaatatggttttaacaagtattttaggcaagtcttacaaatctggcctgacacatgacttcacataaaggtttgagaactgagagtctcaccactcacatagaatgaagggtgtcagattctgggagatatttgagatctgatagaaattacaagacttttttacaggcctggtaatgatcatggagatgccagcagctatcactgccaaggactgggtgggttctaggcacctgtcccttgtaacacctgaattggaaaactcctggataaaggtgactttcccattttcagaggagacaatggaatctcagagaagttgaaatgtgtgtgtacccctgtggtgacacaactgattgaatccagtcttaggcatattaaaattgagaaccattgcttaaggatttcttaacagctgtattttattgagagtctgcaccatgctgggcagtatctgtgtgtgtgtgtgtgtgtgtgtgtgtgtgtgtgtgtgtgtgtgtgtgtgtgtttattttttatatatttatttttttcaaatggactctgttgtcaggctggagtgcagtggcacgatcttggctcactgcaacctctacctccttggttcaagtgattctcctgcctcactctcccgagtagctgggattataggcacgcaccaccacgcccagctaatttttgtatttttagtagagacagagtttcaccatgttggccaggatggtctcgatctcctaacttcatgacccacctgccttggtttcccaaagtgctgggattataggcgtaagccaccactcccagccatgtctgtgtattctaaggtgtttatttccatttgtcttcccaatgactttataaagtgagagagaatcctcattctatggagagggggaataagaccaggaaagcctgaattgaaaccaacgcttactcctaaagactgggctttgagttgctacattatatttcacacctctgtcctttggaggtgaaagttacttgatggtgatgtctttagggaaattatgacaaaggagaagtgaacgttggagtcaggtcattgtgtgtctgattacttactggctatgtcacctggtttataaaatgggcttgatttaatgtactgagtgaattagtgtccccccaaatttatgtccacttggaaccttaggaggagatctcatttgaaagtagagcctttgtagatataattaaattagatgaggttatactggattagggtgggccctgaattcaatgagtgttgtccttgtaagaaaaccatgtcaagacgcacaaaggtaagaagtccaaggggcatcaaagacagattggactaataccagggacaccaaggattgccaggagctaccaggatctaggaaagaagcaaggacggactctccttgagagccttcagatggagcatggtttaggcaacaccttgattttgaacttctggcctctggaactgtgagagattacctttcttttattttagtcacctagctggtcataatatgttatggcagtcctaggaaagtaatagcacatgagatattttttcttgtttgttgttgttgtttttgtttttgttttttcctttatagcacttattgtaactagtaattttctttgtttgcttaccaattctggacatactggaatgtcagcaccatactgcattttgttcatcatccccgtatctgtgatgcttcactccaatagcagctcagttacgatgtgtgaacggaatgtatgaatgaatgaatgagtgaacagagctgttgtgaggactaagccgagcagtacagtgaaattgcatcaaacagtgtctactaagagcaagcatgcagaataaaagctatcatgattatcattcgaggcaggaattatctttttttcctagggtccctctgccttgctgagcatcaaggtgaacttgagtagttactagttacgtggactgggagaacacggttaaagtaaaggttgtttttgtggagattgacaggcaagagcccctgcctttcctttcctgaaacagcagttttcctttgagacacgaagcccaccactgagagaggcagggtgcgggtcatgggggtggaggtggcggcattgtttgcaatcctcttggccccttgctcacagccaggcctctgcctttatattcttcggggggctttgatctcacctccctgtccaacagatgcacattagtcagtaattctaggagacatcaaaaccccagccctggcaccccccgaccttccctgcagccttcacaagccgctagctgtgttaataggcgccagacaggactgtgctatttcttagagcttaggtagaatgctactgcggctgttttactgaaccccagctcagtctccacttctttccacctctgacccagtacgtttagaattagagccaaatgctctgagtgaagagttgcccgacacggtgacttgatttacctaaggctgctatattctttccgaatgttctttccagacagaggtggagggcaaggaactgggtcccaggagctagaaaacgtggtcttgggtctcagctctgccattctgacactgaataaccatcatcaagtcacagacatcctcagagcctctgtctctgcatcgggggagcagaaccaggaatgctggtcctgcctacctgacagaactgttttgagagtcacgtgcaaaatcagatgtgagcatgccttagaaattggaaagtgtcgtaaaactagaagcacttattactattattctgtgactctgagcttataaaaaaaaaaaaaaaagaaaaagaaaatcaggccaggcacagtggctcatgtcagtaatcccagcactttgggggacagaggcaggtggatcacctgaggtcaggagttcgagaccagcctggccaacatggtgaaaccctgtctctactaaaaatataaaaatcagccaggcatggtggcacgggccagtaatcccaggtacttaggagcctgaggtgggagaatcgtttgaacccggagggtggaggttgcagtgagctgagatcacaccactgcactctagcctgggcaaaagggtaaaactccacctcaaaaaataaaataaaataaaataaaataaaataaaataaaataaaataaaataataaaataaaattggttacttaccttgtgtcagctgttgcagatcaagaaactaatacaacgcaatcccttatggtgtgcttaaacccatattcaatatagaaaatatagtatatccagataaataataataagcatagttatttcatcacctcgttgaccacctggttgtttatcttttgagaggctttgcaatgtttgacaaaaaattagaaaatagataaaaatgcaaagatgatacctgctatactgttttgtggatttctctttaacttaaaataccatacatacaattccgagtcattattcaatgactattcagattttaactttttgttttctctgatggcttctttgtgtctcattgcctgggatcatttggattggacatagtttatttagccaatcccttgtagttggacacttaaattttttcccatttttcactgtgacaaatatcaccttgatgaatttctttctgcaaatctctgcacactaccgtgattgtttctgtaggataaattcccacaagtagaacttctgggtcaaagagtaaaaatgcacattttttaaggcttttgatagtcagataaaactaaaacaaaatcaccctctagaaagatcataccaatttaaactcccaccaagactgcacggcagtgtcctgtctcctgcactcacaccagtatcaagcattatctcagagtgatttaaaatgcctgaagaaaggagtgataatggtttctaaacagcactggctaacgcacagccctgcatattggctttcagcttgataaatactttcttataaggccataaatattggtggtaccaaaggttaacgtagtgtgcaatgctgtaaaatccagcaggcaacctgctagctcataatgatgcattagcacctttcgatatgaagtgtgatgacttacaaagtctgtttgtaagtggccactaactcaacaagtgtataattgtgtcagttggcaccacagtttctgcaaacataatttattaagtgagcaccttgccttctgttatatgccaaaaatgagaagaaaagacaagagaaggggaaagaagaaaatgatcatctgactggggcatttagtcccttctgcaagctagggttacttaaaagaccaacatactttattgaagaaaaaacaaagcaaataatcctttccatattttaatagtcagttgaccacactgctggcagtgttagaatcaggattgaggcaggcatgacaaatagctgcaccattaaaaggcatgtgcatttgcaaattagacttttaaatattttattttcgtgtttttaagtttgcaactcaggcaccttgctcctaccattttatttttgcaggtggaaacagttgtatagttctttgctattgttctgggatgggctagcatgaaggtgaaacctgttttgtgattaatgaacatggaggttgtgtgtatttaacagcagaagagtaatctatcctgataggagacaaaacagaatggataccaccagccgtgttcccgtttggctttgctccttggtaatggaggaaatccaggtattaaggatagactttagtaggcccatctcagcatttgcccgtgtgtagtgcctgttttggattgctgtaaagaggacactctgtaaacagaaaataagctagacaggcacattttgagctacttattctgttcattttcagtgactgttcaccctgtgcaatattttgaaacaaaccgaggagttattcacgtcatattctttcttactcgtttttcatattttatttttacttttgagacagagagtcccatctgtcacccaggctggagtacagtggtgtgatcttggctcactgcaatctctgactcctgggttcacgtgcctcctgaatagctggaactacaggtgcctgccactatgtccggctaatttttgtagttttagtagagacagggtttcaccatattggctaggctggtcttgaactcccaacctcaggtgatccaccggctgcgccacccaaagtgctgggattacaggtatgagccactgcgcctggcctcgtattagttgttctttaaacatttacatttgacactgagcactgggaatacagaggtgaatggcacctactccatccctcaaggaactcatcctagtctagagctgtgaaccaatgcaaggggcaaatgcacacacatgcggttgcacggatgagcaggatgctctggggcaggagcgggggggcagtcaaacaagtccaaagcttctcgcctccagccagtttcggctgctgttcacccatatctcccatcgcctgggagcaaagacagctttgctcagagttttcttctccacttgaggccgccatgtttgcctctgtctggagttgtcagcctggctactgactggtagaaatcagagaggaaattccaggcatgatggcatgttcctgcctattagttagggacccacttcattatgaatgacatagtcactatgaagacctgacctctctggcttctggaagaatgttgaacatgcagaccaaggaaaagccaccatcccagagctcacattccagggatccgaagaaacacatcagagtaatggctagcccagatggtgataggagagaaacagagaagagggtggacaggaaggactttctgaagaggcgacatttaagccgatgactaagtatgaggaggatccagtctggtaaacagtggaaggcagaggttccagagagaagagctggcatatgccaaggccttgaggtgggaaacaccctcgaaatatttacagagtggaagtagctcccaatgcctatgacttcactagcccccaatttggaacaaccattatggctgctgaatgctgtaggactgtgaataagcaaagaagtgtttgaaatgaggttataaaggtaggtagggccatgcaaaccaggtgaggagtttaggtgtaattctaggtgcaagaggaagccactagaaagttttgaagcatgaagagtacctgtattacggttctctaaagggacagaactaataggatagatgtatatataagggggagtttataaaggagaattgactcacgtgattacaataggtcgtctgcaagctgaagagcaaggaagccagtccgagtcctagagcctcaaaagtagggaagctgacagtgaaaccttcagtctgtggttgaaggtccaagagtccaaaagctgaagaacctggagtctgttgttcaagggcaggaagcatgcagcatgggagaaagatgtaagccggaagactgggccagtttagtctttccaccttcttctgcctgcctttattctggccacgctgaccactgattagatttgtgtccactcagattgtacgtgggtctgcctttcccagtccactgactcaatgataatcttcttcggaaacaccctcacggacacacgcaggagcagtactttgcctccttcagtccaatcacgttgacaatattaaccatcatcatatccttctctttttctttttcttttatttttttagagacagggttttactctgtcacttaggcaggagtgcagtggtgtgatcatagctcactgcagccttgtcctcctgggctcaagcgattgtcccacctcagcctccctagtagctgggaacacaggcacacaacaccatgcctggctaattttttaattttttatagagatggaggtctttctatgttgcccaggctggtctcaaacttctggcctcaggcaattctccctcctcggcctcccgaagcactggaatgccactatgcccagcctacccttctcctgagtgagttcctccagagtcttttttttttttggctgggctgggaaatacccttgagttccggagaagggaagtggtttctggaatcctctgcccgtgaaggttaatttggcaatatgcatatctgctctggggctatagaggcagctgtgacgatgcccagagggggacctttatgatctgagagcccgtggaatgtttgtagcagcagagccgtgttgtcccattgaatgtctcttccatttttaatgaggagcctgggggcactgtatcaataaaacgaccaaattattaaattatcactctacagggcatcttatattagtcctaattaaatgatgcttttcatattaacaaacagtgctcaaaaaggattctcatttttaattcggacctcattgaaataggaagccttagaaatttctagaataggtactatgcctctggacgaatatgcaccatgtctctggactcactggagggcacctacagtgagttttcagacactgccctgaattttaaaaatcctcagtatccacaatgactacctgtcttcacccagactcagaaatgctaatgggggtcaggtgcagtgactcactcccataatccgaacgctttgagaggccgaggcaggcggatcacttgaggtcaggagtttcagaccagcctggccaacatggtgaaaccccagttctactaaaaatacaaaaattagccgggcatggtggcgggtacctgtaatcccagctactcaggaggctgaggcgggaaaatcacttgaacccaggaggcggaggttgcagtgagctgagattgtgccatcacactccagcctgggcaacaagagcgagactcaaaaaaaaaaaaaaaaagaaaaaaaaagaatatttacaggacttctgctttcgccacgatagagtaacagggactggtgtgcaccgctgccttaaagaacttttaaaaaggtcagtctcagaaattgccactaaagaattttttccatgcaaccaaccaccacttgtcccccagaaacaactaaagtttagaaaaaagtcaccatacaagcaacagtgatttcagacgttagacagcatgaggcatccacagaggggaagcagatgagatgtaccctccaggggccccagctcactgccttgagagggtctctaagccataggacaaggggtgggggcccaaataaggaatatttggggcgcacttgctgggtgaaagccatgagacactggagagacagtagtgatccagtcagccaatagctctgtgctactgagctgacattgttttgagggaaatggtcaataagtgagcaaataaatgggggtggtttcagaatgtgagaaatgttacaaagaactaaaaagggtaatgcagtggaatactgtgacctggaggagcaggtaggagttactctagctggttcagtggcatgcaggaagctgctggaataggctgccaagggccaattatgagcattactagccaaatctgtgttccatgagatcccactggtagcttgaaataggccatgatgtcaatatttacaccacagacattggcggtgtttttcttttttctttttccaacatactacggatggtatggccaagataggtttcataaagaagtgcacatttctgtatgacattaggataaagaacagcccatcatttatgtgacaaaccctaggaggaatattccagcagaagaaatagcatgtgcaaaggccgtgtgtccacatcctccatttcttcattctctatgatgttcagggcaggtatttttacccctccccacaattgtataaggagattttcattgtcacgtgtgtcagtcattttatctcattctctccaccacccgtttttaattcccatgttggtacagtagagaatatctttatccagttatccttccttcatccttagattttgtttcctgatttctctttccttgtacttcttttttcatagaattttacaacttgttttcaggtatgcttctttatttccatgtctatgagagctttgatcagcagctatagtttcttatgtaatccatagactccatcaatttcttttatagtgagaggcgacaggatactcattttacatctagaggcaaagtacttcagcactggaaggtgaaaagacttcagaagaccttttctggaagccttttctttagcagcagggtgtcttcagagaagttgcagagttgagtctaatggaacggcctgaatgaccactgggtcaatgttaattgataatgatgctttctaaggcgagatctgaactgaacctcaactcaattcttaatatgtgcggcagaagcaaaaacaagaaatccatagttcatgaccctataagatttatgtctaaagcatttccgacacccattctttgttgtgaacgactaatttgccactcttgtttttctttctttttttgcaatggagtgttactctgttgctcaggccgaagtgcaatggcgtgatctcagctcactgcaacctctgcctcccaggctcaagagattctcctgcctcagactctcgagtagctgggattacagtttcctgccacaacccccggctaatttttgtgtttttagtagagatggggtttcaccatattggccaggctggtctcaaactgccgacctcaggtgatctgcccgcctcggactcccaaagcactgggattacaggtgtgagccactgagaccggcctaatttgacactcttaagcataccttctctttcctctcagtaagcaagtcagatatttcaggagaaacaaggtatgtgctccttccttctttcattccttccctccttccttttttccccttcctttttaaaaaattttccagtttccacattttaaaattttatttctttctctttttagagacagggtctttctctgtctcccagactggagtgcagtggtgcaatcatagctcacttcagcctcaacctcctgggctcaaattatcttcccaggtcagcctctagagtagctggggctacaggtgcccaccaccacaccccctaatttttaaaattttctgtagagatgggatctcccagtgttgctcaggctggtctcaaactcctggccccaagtgatcctctagcattggtcttccaaagcactgggattacaggcatgaggtgccacacccagcccagtatctacaattttaaaagtggtatacatagcctaagatcttccataacaattaaaaatgagtgtcagacatgcaggactatcaggcactactgaacattgctgaatactcacaagagaagggggatacatatggcaaaatttcaaactcaaatgaagatctgcaagtggccagtgcacttgaaaggtgcacaactcatttcagaaggcactgctcagcattaccaagatgcagctgtgtcctaacccccagctacaagggagtgtttactgtaggttagagttagctgactcagtccatatgttagggtaatcacaacccaattttgatgaactcataaaccaaggaggctgttgctggagctaagaagagacaagatttttagtagatagtgacatttaacctcagctaagtctaggctgtcagcctggcaggtctttttgaagagctaagttctgcttaaaagccattagtgtatgtcaggctctatacattaggattaaagaatgtaagaaggccaggcccagtggctcacacttgtaacccaagcactttgggaggctgcagtgaggggatcgcttgagcccaggaggtcgaggctgcagcgaactatgatcggaacactgcactccagcctgggtgaaagagcaagatcctgtctcaaaaaagaagacaatgacccagatcctattctctcagagcccaaagcttagttgggctgatgggaaaactaacagtttcaatttaatgtgtgtattctaggatcgagctaggggaacaaagagtagcaggcaaaggaatgcacagaaatatttagtcatagcaggaaccgttcttcaactatcttccaaggactgtgctaaatactttccatgcattattttatccttacagcaatcctgtgttttatatacttttaggtaaaagtccattttagtcattagcaacctgagcacagagaggtcagttaacatactcaaggttgcactgcatgtggtaaagagctgaacagagaaaaccaaattcccaagttcagcctgagtcgtgtagactaagtgttagttggagtaaacagacttagcttctctagatctgcttcctatcagaaatgtggagatgttcaaagtcagctgcttacctttagaattgccatgaagtgaacaccagtgaattcagattagttgagcactttgagcctctaacctttttttttttaatttttttatttttaagcaccctacacctataacttaactattcccaatttggaaaaaaattttatgagtgctgtgcactctttttttcttcttcttctacaaagccaagtgcacgacatcaaacctgtaatcttggccacattatcaccatgttctaaccaagcaagcttattagttcagacaattaagaaaatagaagttgaaaatacttagctattagggagaacggagtaacataaatccaaggtgttgggacaattagcattcgtagtaataaaagccaagtagaacactaaggaaatgaatattatgtttattatttagcatttaggtagtattgcatatttataaaatacctggtaattgtttttggtcatttctttcagaataaatcggataaagggtatttgctattgttgtgagtagggtaagggggggtttttagtagaagcccattaaattacaatgcatctccccaccctcttaccctcaactcagatttaagtacagaaagaaaacattcagaaatcttgctgaaacagaaatcatttcacttttctcctttgttaaaagccttctgatgactcccccatttctgttgcagcaaaaggcaaaatcctgtaaatgcaacttgatgtcctagaatggattctggaacagaaaaaggacataagtagaaaggctgtggaaatttcagtaaaatccatggtttagttaatagacaccagtgttaccttcctcgttctgataaatgcacgtagttgggtaagatgttagtgttagaggaagcggggaaaaggatataagaggaccctgtgtactatctttgcaacttttttgtaaatctaaagttattcaaaaagttaaaaaagattttttgtttaaagctaaagttcttagagcagactacaaagacctgcgtgacctgtttctgtgccctcgtcaggtctctgacgtcatctccttttctcttccccttgaacgttctgtaccagcctcacgcttcatcactttctcaccgcaggacctttgcactggctgtgtctgggactgggctattattgcctgagctctccctgtggcccactcttctttgtcaaattgtgattcaaatgtcaccttcataaaagccatccattgaaaatgtcaagcctacctccacggtcccttcctcctgctcagtatttatctcatggtgcctatgcttccaacatgctctgcaatgctctgattgattaggttatgcttcatcttcctcctgctctcctaaaacttacgttccttgagaggagggattttttcctgttttctccacgatgcatttccaacacctggaattgcatacttagtgcttaatggatattagttgaacctaaatattaaattttatactacaagaaagtaaccctaactctgaatgctttgataaccaaggcattgtggtaaacactctaaattttctagatcttgtggcatcttcatgatagcttaaaatttgagtatcatgaccaccatttataaggccctgagaagtcttaagttttgcacaacatgacgcagctcttcggtcaaatctgagagcccagattcgaacttgcatctcccaacactacagctagttctgtttcttgtacaccagattgtctgctagatttgcatgcttcccctccatttcattaaaccacggcacatgaagaaatagcattactcatcaagtcagtagttgtttgagtaactcagatccctttcttagatgatggtacccaagataaatgtatggaacatattatttcccatgatggccacaggtaactctggaatattataaggtttatttgtataagcaactcagtatgaaacttttaccttgaatttccccttcatgggcctatctttgttttcattttcaacattctcttttggatacagagtttcattcacctaagaaagcttcatgacattagtggaaaggcactggttcagttctaagaccttagttctaggacccactctcctatctgctagctatatggaccccttcttaggctttaatttcctcatctataaaatgggcataattttaccaccaacttcatagaggtatcatggggataaatggtataacccatgtgcaatggtatgcactgctgttattgtttgaaaataattctttgttgaatcagatataaaggttgttattgttgttttctgaaaccgacttagtttaaaattactaagtcattttaatatctatcaaccatttccatagtttctaaggatttctcccaaatgcctctgttaacaacaacgacatcctcctcctcatcatatggatatcatgaaacaccaattatatcaattattgaacagttatttggagtcaggcttgatacagtctttgtaatgttgttttattttttgctgtgagtccacagagcgagtattataaacccattttacagatgagggaactgaggtaccatggaggtgaagtaatttgcctactgtcacgtgctactcatggggccgggtctcgaacccaggtgtttcttcctatagctgagggcttcatcagtacttagcacagctttattgccaaagagaattgtaaagcaactggaaaaatgaccaaaatacaatacctccaatgactatttttaaaaaaacaaaaaacagccgggtgtggtggctttcacctgtaatcccagcactttgggaggccaacgtgggcggatcacttgagatcaagaattccagaccagcctgaccaacatgttgaaaccccgactttactaaaaatataaaaattagccaggcatggtggtgggtgcctgtaatcccacctactcgagaggctgaggcaggagagtcacttgaacctgggaggcagaggtttcagtgagccaagactgtaccactgcactccagcctgggagacaaagttagactctgtctcaaaaaaaaaaaaaaaaaaaaaaagaaaaagaaaaaaaaaaagcattttcttaaactgtggcccagaaagcacttttatattagaattacctgatgcgcttgttacaaacacatattgctggctgtaatcagtgaagtgctagtaaatgcttaacaactagcttggtgggggaaggagcgggagagggctccagagactgatctgaagcatttgccaatttccatggtgcaaatactcccatcatggccattgcaagataccaatgcctcgtcactgaacacagagttaggaaaaaatatgcagaagtggaccatcacgcagtatttccaccatccagatactctaaacaaacaaacaaaaaacctcaagagcacagataatattcaagtatggtaaaataatttaatattcaaaactcattatttcttattaatttttaatatactttattgaggccaggcatggtagctcacgcctgtaattccagcactttggggggccgaggtggtagatcactggaacccaggagttcaagatcaccctgggaaacatggcaaaactccatatccactaaaaatacaaaaattagctgggtatgttggtgcacacctgtagtcctaggtactcgagaggctgaggtgggaggatcacttgagcctgggaggtcgcggctgcagtgagccatgattgtgccattgcactctagcctttgtgacaaagtgaggctctgtctcaaaataagacatacatatatatatacacgcgcacacactcacacacatatatatttatgctatatatgtataattatactgtatgtatatatcaatatgaatatatacatgtatagtacataaatacatgtgtacacatattttcgtatatgtatatacatatacaacatatattaatatgtatatacatatactttcttactatatatgctttaattatgggcttatgtcatttcattttttattaaaggttgtgtttaacaacagagtcacagaattcctgacaagttagcaactggctttcagaaatcagtatcaacaaacttcaacagtccaccagctaccccaggctgacaaaatcagcaccgaaaaggctggagccctggaatgtgcatttctaaagagcatccaactgcttctggtgcacactcaaagtattgagccaatgccataagcctttctgagagcacttgtgaaataagtatatgaaaatactatataatgtggtaagcatctgaaaaatgtagatgggattcatattcctagcaaatgctagtgggcatttatgctaaatgaaccccactgttactcttttgaagatttttttccctacttttaaaatggcataaaattattttatagttttattttattttacccatcaatgaagagtgcctggtctctgttaaaggagaaggtagtaatcctatttcccttgcagccagcataggagaaaggttcagaggcctttcctgaaaggtttaggcaaagataacaaaatgtcagagaaagctgcagggcagggctgaatggaaaagtaggtttgtaatctcaaattcaatataaaagatcgaaagtatcaaatagtcagtggtgagcctctccatcagaatgttatatctgccatgaaattctgctttatgattgtattacgttatatacattatacatctctttctctcagtctctctctttctcacctagtctctctttctccctctcttcctttatatattctcatagaaactagggcacatctgagatccataaggaagtcttgcttgactccagtcagagaaaccattggaaacatcacctgcctccaaccccaaccccatctgccttaaaaatataaaagtctttctttttaggtggaggttttgattcagggaaaacacaggccttgcaaattaagagcagcccaagaattgtgtgcaaaccctgatacacgagacacccaatccaaggcttgcactctgtcctctaaacagtgattgtgctttccaaggtggatatggagggtaattaagaatgaattttcatgacttgtgtctactgtgtgcccacacagtgccagaagccagagtaagaactttgcgggcctttcgcttttcatctaccctccttagtctttggttcttatccaggcacttaggagtttctcaatcagtattctttgaatgaatgaattcacaaatccccattttaaggctgtgggaagaaaggcctttagggatgaagtaacatgtccaaggtcaaatagttgtctttggtcaactgttggtcaaatgctacacaattacaggattgcctccctaaggtatagacagtggctgttaaaagaatggatcctatttgtcacctgtgaaggttattttaaaagatttatcttgagtgcataggagtatgaatgggtcactctgggatggggcccagaaatctgggtgttccacacccttacccaggtgacttagagacattcagcaggctgtacctggagaaagaccagtgcgattcatgtaaatctctctacatctccaaccagaggcaaacctgtcaacttttctggctgcaaaatctgcaccttgctaaaggctgtcaagaaccccctatggggggtggacttcttggcttacccaccctccctacatctctgatccttgcatttttagacgtgacaggtgcctgcaaggccaccaaatttcatgtcttcagtttattcagctgcaaaaaatttcatttcagaaacatgacacaatgagaaactgacaaaaggtgggcttgaattcaagtctcctaaatgaaagtacccccagtgactaaaagtcttgttgctgctccggatttcacattgtcatcctgcggtgggaacatatcttgcatttttatgtagagtatcaaaaaaaaaaaaaagcaaaaattgttttttggaacagccaaagcgtgtcctggagcataatctaatttgtttctctatggcccaagaaaagagggggcgagtgtcatccttcctttttcataaattgagattcagaaagggcgagtgactttctcagtcacacagcatcatgtctaccacccaagtctcacccgcttctcattggagccacaaatgacataattagatgagagatgatcccaagactagcggatgtttccctttcttcattttaagagtttggacttttttaggggacctaaacatttgctcctgagctctgctaatgtgtgactgctgagtttttctggatgaataagacttttttcaagaaatttcacatattcccgtctggccgaattatgtatccaaatgtttttccatcagagaactcatccgttgtcctgtgactgtgtggtttattcatttctcctccacaaagctaggagctccctactggttcaggttatgtcttcttcatccttcagtccccatatgtagcaaatgttctttatacaagcagatcttaaaatggtagctgagttgaacagtgtagacacagagtatttgtccctctaagaaccaacatgggaatccatggagctcagaccaaatccagcccactgtctctgcttttacaaataaagttttatcaaaacacagccacattcatggttcatttgtttacatattaccccatggatgcttttatgtacagcatggcttatgatgcccaactattcactctatggccctttaaagaaaaagcatgctatccccatctagatgaagagacaagtagaaaggagatgcaggcatttctattttcagagtatatttcttagcatttccatttccgaacatatatttactctccttcccacctgccaatgcaggagaaattagcctactgagaaactccgaaatatcctgactagtgtcaatttgcagaaattgtgcagtttatgtgacaggattctttcactgtcaaatttttgttcagagacatatcggtgttcacaaagaatgatatctccatgtctcagcatatcctggaaaaaccccagtagtcctagaacaaaactcttggagtgcttgtctctttgtttgaagcatttatattaatacaaagaaagaagtaattagccaggaaaacccagggatgttcagggagatcagtgccatcttaaattcatcacccattttctgcaactgaattgtgctttcagcagttttcttaggtctgggaaattagcataacgtatagaattgccatttggttcatttaaatcttgcataatatattaggggggaaatctttgagctaagtggaatttaggatttagtaccaaatacgaacttttgtgttaaattgatgtataggttggccttgatttctgagtgggacaggtaattaaagaaaaccaggaggttaagaggagatgaggaaaaaaaaaatactgcaggaggaaaaggttggaggcgtcagccagaaagggaggctgctggaagattgctaagctagagaacaatgcagctcatttttatgagaccattaacacagaagacagtggcaacaatcttgggagtatttgacatgttcccaaaattagttgggtgcgggatgtcatggcacagagctgtgtacctgctttttatctggggatttataaaagtggagccttgctggtgtcgtccaaaacagcaggatgggaaagagctgttggtgagaatgcattagggtacctgccgcctgttccctgtagttcctctggctcttgaaagagcctgaagttacagaagagggcaggagttctaagggtgtccaggaggccaaatgctgaaggagaggaccctcatctgaaaggagagttggaagcaatgaccattggcaacagccttgaagacacgagaccctgggcaactatggagaatgacagaggatggctgatcagtgccccaagtaacctaggaatgtggactccacagccccaccacatccatggaagccaccagtggcacctgagccccagcagaatgagatgggaggcaaaaagaggcacttctcatcaccaggatgcatttgatttcattagctgccttctgcctcctaggttccttctcttcagcccccagtcttgaaagaagcttcttccccagtgggggaaggaggaggaaggtcccagaggttgcacctcatcccactgatcctacaaactgctggagagtttggagccaacaggcaagaaacactctatgcccactgtaggtatactggaccacagatgtgtagcaagaggaagagagttttaatctcattgattttggaagctttaaagtggactggcctgagttttaacaaccaagtgccccgagagctgttgcatcttctttagatgccattaagggacttgacccaggggattgcaatgccagggctctaagccactgtgccacactgcctcccatgtagggactaaacatcccaaagaagctctgaggccctctgaacctcaatttctttgccgtaagatgggcacaatattagaatcctcttgtctgagtcatcagacaatgtgaagagattaatagaatgctaatcactcaaccaggatttattaaatggcaatgaagtattaatcagccactcttctcgatgctggttattataataatcatggtccatcctaagcacttacaggtgttgactcatttggggtagatgccaatagtattcctattttctagataaaggtaatgagacagagaggttaagtaacctgctgcagttcacacagataggaagcagtgaagctggaattcaaatctagataattgtgtttcgaagtctataaatgtgtcttgttgttattgctattgttatatatatacatgtttttttcttttcttgcttcaaacaaagtcttacactgttgcccaggctggagtgcaatggcacgatctctgctcactgcaacctctgcctcccgggttcaggcaattctcctgcctcagcctccatagcagctgggactacaggcacacaccaccacacttggctaattttttgtacttttagtagagacgggggtttcactatgttggccagactggtctccaactcctgacctcgtgatccacccacctcggcctcccaaagtgctgggattacagggctgagccaccgcacccactctattatatattttaactacctatcctggaaccaaaagccaaatctttgcaacaagaagaggagaagaaagagtgctttttgtagtcttgtcattccactttctgataagcagacaccaacctccaaccctgcccactgtaccaccggggcctgatgtatagtaggtgctcagtaaatatattttgaatgattggataactgagcacctgatttcaagcccccaggacaaacaatgcttctttaagtgcaggtgtttgtaggcgctgcctcagtaacacagctgtggactgaattgtgtcccctactccaggtcatatgttgaagctgtaaccaccaaagggatggtgtttggaaatggggactttggaaggtaattaggttaatttaaggccacgagagtagagcccgatgagacagtatccatacaggaggcagagatatcagagcttccctccctcttccatctgagaacacagaaaaaaggcactcaagccgggcgtggtggctcacccctgtaatcccagcactttgggacgcagaggtgggtagatcgcgaggtcaggagttcaagaccagagtggccaacatgttgaaacctcctctctactaaaaatacaaaaattagctgggcgtggtggcaccagacacctgtaatctcaagtactcaggaggctgaggcaggggaattgcttgatcctgggaggcggagcttgcactcagccgagattgcacctctgcactccagcctggctgacagagcaagactccatctcaaaaaaaaaaaaaaaaaaaaaaaaaaaaggcactcatctgcaagccaggaagagggcccttcccaggagctgagttggctggcactttgatcctgcactaccagcctccagaactgtaagaaataaatgtctgttgtttaaaccacccagcctgtggtattttgttataacagcctgagaagactaatacagacacctagacaaggctgtctcctttactgatgtgttaaacacctggccccttgtacattcatcctatttttttcccaaggaataaaaatagcaaaggaattcggagtcagcccttctctgtcctccagcccttctcctttcagaggaatttcatcactggagcagagcattgaattcattcgagttgcagggaaatgtgatgtatttcttaaatctgtgtcacctggccgtggaatcagcccagccaggctcgaaatgaggcattaactacatccaaagctgtgtgattaacttatttgtttgccgacggagctcaaatgaaaaagcaggaagctgggaggatctgcacgagccccgttttgaagtaggattgtgagaagacccgaagtgtgggttttagttcacattccctgggcttaccattattattacttttaatggaaaataacttttcacaatcttgcttcgttttaaatggagaatgtgcaatattgtctaatttagggtgtggagttgatctggtatgcatgatttttcttcccccgcccgccaccatccttggattctttgtacacattcaatatagttacatttttgcttagaacatatatattttcccccgaacttttctcgattgcttttttatcaggtttacaaatcaaatcaaataggtatattgcagagctctgcgatattattttctgagcttacagtacaatgtattgaattatgccagcccatgctctgccctgctattctctgcagactgagagagggggaccgtggaccctgtaaattcactcggcgcccagcattactggctaaatcaagaccgctcttcagtctgcaagaagagacagagcaagtgttcgttacacaaatcaatttggtccaaagtacttcgcagtgggtactcaaccatcgctcacataatattgtcaacttaatcaaataatgcctcgaagacactcagaagcttttctctctgagaaataacttgattggtggaggatggagcagcagctggctcttcaaagtacactttttatttatcactgtgaagagttttgtgcatggaggggaggaagcctgtaggaaaggaaagaggctgaatagtcagtaggctgactgtggggagaatcatgcagcattcatgtcgtgtcttgggtgctgggtttctacaccgtgatggtgaatttggggatgctcgtggatgaagcagcagctgggcccaaatcattagtttcctggaatgattcaggaaagacttgccgagcgcctactatgtgtcatggtaaggggcttttgatatagtgcatctgatacagtgtttatccacgggacgctcatattctaggaagcatttgatatggtgtttagtcatggggtgctcatattctcgtaagcatttgatagagtgtttatccataggatgcttattctaataagaaaacctgtcagtgagggcttaacagaggtcaacccaggactctagtagttcaaaccacacagctgaagcagcctgcttttgattgctttttaattggttggatgagctagggcctcattcacccacctcactgctctgtttccagcccagacctagaacataggcagttagggtttctgtgaatctttactcctgtctatatgtactttgcagctgctctacgtgcctgctcttagactttccagagcattttcaccttgaccttgaaaggccattcaggagcgaaaagagtttaggatacggaattagatatcctaagttcaaaccttccatctcctggctgtgtgacttcggacagatcgcctaacctctctgagcctcagttttcctagttgttatggcgactcggtaaaataaggcatggaaaacaccagtgagatgcttagctcatggtgggacctcagcacagttttcttttccatcctgtatcccagaccatttagccagtttcacattttgcttataaactacgagtggcattcagcatcagtgatagccggaatcctttgtcttaactcaggataggggagaagcaaaagccttcctcagtgatccttttccacatccaagggtgtctatgtatcctccagggagcttgtgaactttctgaaatcgtatgcaaaatttaggtgtatgtgtattttccccccaaaaggtggtccacagttttcataaaaccttcagtgtatccatgaacaaagaaatcgattaagaaacatgtatttacagagtaaagggaaataccacccaaaaataatggtatcaacaaaagtcacagctgacagctactgctaatggaactgactgcctgagcgacccactctataattaaagctggatatatatatatctccctatatatgtatatccatatatatctccctatatatgtatatccatatatatccctatatatatatccatatatatatccctatataaatatccatatatatatccctatataaatatccatatatatatccctatatatatatccatatatccctatatatatatatccctatatatatatccctatatatccttatatatggccctatatatatatatatatatctccctatatatggccctatatatatatccctatatatggccctatatatatatccctatgtatggccctatatatatatatccctatatatatatccctatgtatggccctatatatatatatccctatgtatggccctatatatatatccctatgtatggccctatatgtatatccctatgtatggccctatatatatatccctatgtatggccctatatgtatatccctatatatggccctatatatatatatccctatatatggccctatatatatatccctttatatggccctatatatatatatatatccctatatatggccctatatatatatatccctatatatggccctatatagatatatatccctatatataatccctatatatatatatccctatatataatccctatatatatccatataaccctatatatatccctctctatatatatccatatgtatacctatatatatccccatatatatacctatatatatccccatatatatacctatatatatccatatatatacctctctatatatgcatatgtatacctatgtatatatatatatccatatatatgtatggatacctaaaattaaagctggatattttttacagtattgcccaagaaaaaacattaaaatgccaaatttatttcatttaaaaatagatgtatttgaaacttagttgactcaataatattcctcatttcaaaggattctattgctactggaaaggggtcctgatccagacaccaagaaagggttctaggatctcacacaaaaagaattcgaggtgaatccatcaagtgaagtaaaaataagtttattagagaagtaaagaaacaaaagaatggctactccataggtagagcagccctgagggctgctggttgcctgtttttatgattatttcttgattatgtattaaacaaggggtggattattcatgagttttctgggaaagggttgggcaattcccagaacttagggttcctccctcttttagaccacatagggtaacctcctgacattgccatggcatttggaaactgttgtggtactggtgggagtgtctcttagcaggctaatgcattgtgattagtgtataatgaacagtgaggatgaccagaggtcactttcgttgccatcttggtttcggtgggatttggctggcttctttacctgttttatcagcaatgtgtttattacctgtatcttgtgctgacctcttatctcatcctgtgacttagattgccttaactggctgggcgcggtggctcatgcctgtaatcccagcactgtgggaggccgaggcaggtggatcatgaggtcaggagatcgagaccatcctggctaacatggtgaaaccccgactctactaaaaatacaaaaaaaattagccgggcatggtggcgggcacttgtagtgccagctacttgggaggctgaggcaggagaatggcgtgaacccgggaggcggagcttacagtgagctgagatcacgccactgcactccagcctgggtgatagagactctgtctcaaaaaaaaaaaaaaaaaaaaaaaagaatcacttaaaactgtctgggaatgcagcccagtaggtctcagcctcattttatccagcccctattcaagatggagttgctttcattctcctgcctctgacaattacggtcattgtcctagggaagactttctttctctactttcctcccttttaaacccattatccgttatcgctttttcttcccccagcacaccatggctctaaaacaggaccgtcccattgacagtgatgaaaatgttctatacctgtgctttctgatgagcgtgcaatagttttcttttgctgtcagatgaccatacacctagtaacttccacaacacaagtatattaggttacagttctggagatcagaagtgtagcatgggaatcaccaggtttacaaggattgtagctggcaggatgatatttctataggctcataatttgatctttccccatgcctttcctggcccctgaaggccactgtcattcttgggctcatggcccctttccccatcttcaaaatcagtaatggtgggttgagtttttctcacggggtgttcactctgacattgggggttctcttccatgccactggcctctgtttcacttctcaggaccctggtgattatacagggcccacacaggtaatccaggataatctattttatggtcatgtgattagcaaccttaattctccattgccatgtaaagtatcctattcaagattccaggtattagaaccttaacatctttaaggggtcattatgttgttttccacagaaagccaccaaccacaggtgtctgttgagcacctgaaatacagctagtgaggccaggtgtggtggctcatgcctgtaatcccaacattttggagaccaaggcagaaggatatcttgagcctaggaagttgggattgcagtgagccttgatcattccagtcttgggaatgggagtgagcgcctctgtctccaaaaaaaacaaaacaaaacaatacagctagtgaacttgatttaacttcaatttgaatgtaagtactgatacttgattgttattagtttgtttgggggatccttcacatgtcattttttcaaaggctaaatataaatcaagtatttccaatgacaattcagtttccatatggagatgtgtaaaatacaagatttcaaagacatcctccaaaaagaaaagaatataaaatatcttttacatgatagcatgttgaaataatatccttaataaattgggttaaaatgaacgttcttaaaattttactttttttttttttttaaaaagtgacttctaagaattctaaaatgacgtatatcacttacattttattttacaagacaggcttctctaaagtccttcaccagcatccttgagctatatctaatgctgtgtgatgagtgcatgtatttttcatttccatcaaatagaatttgctacagttcttattttatttctaattatcccctctcccctactgagcacagaacttcaacatctctaatttctgtctgtattctgatttctactgacaacttcatggtggtatcatctaccacattttactcaaccgaaactggatgagtaaggactgccaccagtaccctggacccacagacaaccctgagatagaagtcatttatctacgcttgcagctaggctcagaaggatgtacatagctggactagtgatgaaactagagttttattgcagagctacctagccataaatattccttccctgaatgtacattagctcaaccattgtggaaaacagtgtggtgattcctcaaatacctggaaccagaaataccattttacctggcaatccaatttctgggtatataccaaaggaatataaatcattctgttacagacacacatacacatgtatgttcactgcagcactattcacaatagcaaagacatggaatcaactcaaatgcccatcaatgatagattaaagaaaatgtggtacatatacaccgtgaaatactatgtagccatgaaagggaagaagattatgttctttgcaaggacagtggatggagctggaagctttatactcagcaaactgatgcaggaacagaaaaccgaacactgcatgttctcactcataagtgggagcaggacagtgagaacacatggacacagggaggggaacaacacacactgggggaaggggcgaagggagagcatcaggataaatagctaatgcatgcggggcttattacttaggtgatgggtgcagcaaatcaccatggcacacgtttacttatgtaacaaacctgcacatgtactccagaacttaaggaagaaaaaaaaatccttccctgtgcttctgtacccacttacctggtcatcactagaagatgccacgcaggtggcctcagtcttgtctccctagggtcagacagaggaaaccccaggagggggacagaatccaaaaggcatgtatctctacacgactatgcattttctctccaacagtcatccctggattggtcgatatcaaaatccaatttcaccaggattagtctcgggttgctcagagctattcattgaattaggaacgattatagcagagggagccccgtggttctttattaaggtctttgtggaagcactaagtgatcttcaggagattaaagtgccagtggtgttttcttaacatttataacctgcgccgatacctggggagtttgtgtattaagaaaaattctgccgcacagatcccgcctcctaataaggccttcacactgggcccgggtagaagctggcattgtggtcctaatgagcttatcagggaagctctgccaagtgccgcctggaaacccacctcttggggttaatggacttcccatctgtgtagggtcctgcagcctttcctgtttgatggggaggctgcgtctcagagttgtgcatggcctgagaaataaaacaaaagctaggcccggcgccgtggctcaggcctgtaatcccagcactttgggaggccaaggcaggtggatcacctgaggtcaggagtttgagaccagcctggccaacatgatgaaaccctgtctctattcaatctaaaaattagctgggcttggtggcacatgcctgtagtcccagctactggggaggctgaggcaggaga[145 bp omitted]tctttatacaagggacttaaccattcacaaagacttggatgtaatttcactctaaagcatccaggacaagtatacatttatcattttatgtatatgcaaatggagatccagagacatgaagtgagcagacttgcaggtcgctcatggtaaggcttagtcatttacgctgcagatatttactgagaacttaccacggactccaggtcagcagtttcaagtggtacagttttgcctcccaggagacatttgaatcccaggagatattttttgttccaactcacgggtaggcgactggcatgtggtgggtggaggccagtgatgctgttgaacattctgcagtgcacaggatgatccacccatcaaaaataataataggctgggcgcggtggctcacgcctgtaatcccagcactttgggaggctgaggcgggcggatcacgaggtcaggagatcgagaccatcctggctaacgcggtgaaaccctgtctctactaaaaatacaaaaaattagctgggcgtagtggctggcgcctgtagtcacagctactcgggaggctgaggcaggagaatggcgtgaacccaggaggcagagcttgcagtgagccaagatggagccactgcactccagcctgggcaacagagtgagagtctctctcaaatgaataaataaataaataaataaaatgaaccagccccaaatgtcaatggtactgacattgaggaaccgtactatagtggtagagggtttcagtgaacagaaaagccacagtctctgctctcctcgagttacatcctggtagaaaagataggcaatatacaaaatcacagaataaaataataaaaaggcaagaagagatgtatgctgtgaagaaatcagtggtcaaggggagagagagtgctggtgcagagttgctgtagatcatagggccagtgaaggtttctccaatgggtgacacctgggcagagattgtatcggcaagagggcaagctacaggtggtgtcccagggaaagagtcttccaggcaaagggcagaatgaatgcaaagaccaaagatggggtcaggaaaagcaaagaggccaacaagcgacaatgggagacaggcagcaggcaaagtgggaggcagtcacagccgagaacactgaaccttatagacctagagagccaatgacgatccaggttggagaccactgagaagggggtgtccctggccactttcccgtccacctctaacatccttactttactgactgccctcaatttcctccattctctgaattttctgcatggctatgtcctaccttctgatctcccaaatatggtaatgtccattcaggtaggtctcactttagagccaaacataacttttatggccaggcacagtggctcaagcctgtaatcccagcactttgggaggccaaggcaggccgatcacttgaggttaggagtttgaggccagcctggccaacattgtgaaaccctgtctctagtaaaaatacaaaaatgagccaggcacagtggcacacacctataaatcccagctactcgggaggttgaggcaggaaaattgcttgaacccgggaggcagaggttgcagtgaggtaagattgtgccactagactccagcctgggcaacagaacaagactctgtctcaaaaaaaaaaagaggtcaaataaatcaggagttctctcagagattacttcccactaagctttgatgtgctacagctttaggaactataactatgaattccgtagccactgcccttcaggaatgtgcattctagatggtttgtcctattagcaagtttcctagctttttcacattttcttttccttaggaattacacactatgcttttgtcataacgttcagcaagcttctcagggatgctataatgacttctcaagttgaatgaggcacactagtaggtactgggaacatacaggcagcatgtctgtccttgagtgttgatggcctttcaagaggctgatgaaaggctttccagccaggcgtcattgcatccagggccatgatcgaaggccactggggagagtgggctggagagaggaagacttaagtgttctctttggagagtctcattgaagtgacacctgtatcagggttctctagagggaaagaactaataaaatagatgtttatgtaaaggggaatttattaaggagtattgactcacacgatcacaaggtgaagtcccacaataggccctctgtaagctgaggagcaaggaagtcaggctgggtcccaaaacctcaaaagtagggaagccaacagtacagccttcagtctgtggtcgaaggtccaagagtccaaaagctgaagaacttggagtcccatgttcgagggcaggaagcatccagcatgggggagagttgtaggctggaagactcagccagtctagtctttgcatgttcctttgcctacttttatcctaggcgtgttggcaggtgatcagatggggcccacccagattgagggtgggttggccagtccactgacttgaatgtttatctcctttggcagcacactaacagacacacccaggaccaatactttgcatccttcaatccaatcaagttgacactcagtgttaaccgtcacaactcctattgacagatgacagcctgacaggaacattcattcctccttctcctagacctgctttgaggccactcatcttgagaacttcgtgctgcctgaagtggtggaggacgcattgcctcctggataacagctgcttgtttgtactgcatacacctttgctttatatgtttggtggagagatgtagtagagggaatggtgacctccaaaaaatatgtccttgtcttccataaatgtgatcttatttggggggggctgtgggggaggaggtctttgcagatgtaactaaggatca[143 bp omitted]ctcctgcctcaccctcccaagtagctgggattacaggtgcgcgctaccccacctggctaatttttgcacttttagtagagacggggtttcaccatgttggtcaggctggtcttgaactccttacctcatgatctgccccgctcagcctcccaaagtgctgggattataggtgtaagccaccgcacccgaccctagtatcgttttaagaagaaaaaggaagagggaaattggagtttcacccccgcagagggaagtagggactgtggacattgaagcagaggatggaaggatgcagacccaagccaaggaacacctgcagccaacaaaagctaaatgaggcaaggcatgattcctccctagagcctctagaggaagtgtggccctcctggcaccttgattttagatttctgtcctctacaactacaggagaatgaagtccagtggctttaagccgccagctttatggtcctctttcaggaaacgaatatagagacataaaacgctggctggttctaaatatgttttccccggaaggtcccagaaaaaagagaaagaaaagagatcacactcagtggagggctttgtgatgatctctaaccccaacatgcgttaggctctgaggtagctgctctgtcatctcctgctgcatttcatccttcccactatcctgtgagcttagtaccattagtgtcctttttgtttttgttttagaggcagagtcttgctccattgcccaggctggagtgcagtggcatgatcttccctcactgcagccttgatctcctgggctccagccatctcccacctcggtctcccaagtagctgggatggcaggcacatggccatgatcagctattttttttttttttaatttatttagtggagacagggtctcactatgttgcaggctggtgtcaaatgatcctcccaccttagcctgccaaagtgctgggattacaggcatgagccactgcacctagccccattaccccattaatgtcctttgatggaaaagtaaagtgaaggtcagagaagaaaagtgacctgcctaagattagcaaataacagggatggtctgtgtgattccaaaaccctggttcattgtgctgcatcccaccatataaaaggcatgcaggctgaaagagatttcctttttctgttgttttattcactcctcaacctctacttcctaacactcttctttttccctttccatacacccacaatgacctgaaacacttttggcttacttttttattttgcatgctttaaggattctttttaatacacaggtatttctccataacagtttatacgcatttgtatataagcatacactacaaaatgattaattgagcgttgtatgtttttatcaaaggaaacaatgcaaagatttctccaaagtgctgtttgactagagatgattaattttaattttcacatgagcggtataatgctattaatcatttaatatgtttaatcataatctctgtaattcctaattaggttcattaaactgaaacatccagcagttatacacaaatccaaatctatgtttccttctcaggataagaaggagctcattttgtttttgcattgaaacgggaacttctaacaggatggaagagaatggactggaagcttagggtttcagctacagcatctgtaaactccgagtctgggtgtagagtactaaaaccccttaacttctgaaaagtgacagttgcaggattcgagctcatttctgtgtcatggacgtggcaccaaacctcgtattctcagcggagaaaacgcaaattctgctctgtttgggtttcagtgttacagtgttgctcttcgactatcacatgaaggcggcgacattgattgtacacttcttcatgcatttgtttattcgtgtactaataattcattcggtcagtgagtgagccaactgttaaacagacatttatcatttgtgttacaagctggtcataccacactcctgctgtgacccttaggtggctccttattgctcttaggatgaagctcagactcttgctttgcacagtgtcctttgatctagccccttgactatctttgaaacctgtcctcctgccttcccttcatacatgcctcatctgaccagtggtgctggagtccacacatactctcctgaatccaagacatcatttcacatctctgcacatctgcacatgcactgccctgtcttggaatagcctcagtccttttcacctcttctcttagacatctcccacttaacgtttaacctccagaattggcaagcctggctgaacctccagcagtgtcatatgaccttgatttaaggttactcagccctttgtgattgcctcttatcccaacatttaccagtctctggggatggtggctcacgcctgtagtcccagtgctttgggaggcagaggcagaggcaggaggatcacttgaggccagaggttcaagaccagcctgggcaacttagtgtgacccaggctctgcaaataaaaattagctgggtataatggctcatgcctgtaatcctagctacttggaaggctgatgtggcaagattgagcccaggatttcaaggcttcagtgagccgtgattgtgccatggcattccagcctgagtgacagagcaagacccaactccaagaaaacaacaacaaaagacaatgacaaaatgattctatttatgattgtttttctctattggtgtcatgcactaaagttggaattgcatgtgacaaggagggctgatttatgtgtccaacacaaagcagttgctcagtaaagatgtgtaaacactttaaaaataagcaaatgaaaacctttccttcgtgtttctcaaaggaggtttatttctctttttggtatttaaaaaacttgccatcattctaaacatttcgtcactttccatttattgaatacataccaggaacttggccaagttagcacacattaatcaatcacaaagcctcaaaaggtatgaactcattattctttatttaccagttaagaaaatgaccactgtactgcttcctattcaatccaacagtataggcaaaatgactaaatacattgtctaaatacatgacttgcacttaaaagctgaagtcaactggtaggtcttttgataccagagcatcttggaagaatggtttgccagctaacaagatgtctttatttcaaaatgcgattcagggtgtgttaggaaggaaaatgcaaatgaaaccttccagtacataccagggctgatgagaaacttgctaattatgcccatgttatctgagtgtttgttttgtatttcactttgtaagattgtcttctctcggtcgttattattttacacctggctgcctacattgatagttttgtcccaattatgtacttctagattgcttataaacaggtcaggatgattcctcactcataaatttgataggcttctgtgtaagctttctatcatagtttcaaagttggtatctgatgtggatggcatttactgccagctggaggcaatagttgctaattgcagagaagtatcaaatgctaaatgtctgaaatgttaaaactctagaaccgagagtatggcagtggctataatgatacctaatgtgactgtgacttttcccctcgttcctgccaaatatgtgggtgtcaatgtaacgtcatgttatacagccttatttggaagacaggggaggtgaaacaatcagttatgctgatgatgttacatggtctaggcaaacagagcacaacagcactttctgcagagatggaaacgttctgtatttgcattattcagtatggaagcaataactacatgtggttcttgagcgcttgaaatgcagctaatgcaaacaaagttaaatatcttgttttaattcagttaaatgtaaattgtcacatgtggtcaactgtagtggacagcaaaagtttgtacaattagaacctcaaaagaataagtcaatcagctggttatttgaactccagaatgccaactagtcttttcacattttttacatttaattatgttttatctgcacaattacctgaacaattatgtaggcatatcttcagattctgaacagcgtcggttaagaaatacacactgtcctgcctttaaagattattacccccttcttgatgaggttctcgctccccacctcccaaccccagcagctcccagtccccttcctttgctttttctagcctatagtgcttttctctgtctgccaacactctatctatggatttattgtctgtgttgccctcatgagaatgatgctccctgagggcagggatttttgtctgcttttcccactgcctaatcccagattcataatgagcacccagtggacgctcagaaaacacttgctgaatgaatgcatgcatgcatgcgtcagcattttcttcccttctcagattgcttagttctgatcttttcctgccactcatggcaagcaaaagagcatcggaagagagcactgtggtccactgagaacctcttcggtttcttcttgttcttttagcagacagatgacgcagcaccgacggatggccagccccagacacaaccttctgaaaacacggaaaacaagtctcagcccaagcggctgcatgtctccaatatccccttcaggttccgggatccggacctcagacaaatgtttggtgtaagtatcacctttcttcccagcagtgcccgctctgggggttccagagacctccctgtctcatgtaagtttggggtatttacaatactaaggttagatgtttgtatggggagaaacaatttagagcctagtctgcaggtatattgtggctagaatctctttatggttttagcatgtatttctgtacatatgctcaccatgtatctactttaccaagtggctttcttctaagaagtaacttgtaggccaaatggaacacaaattcctagatgacccactgttgaaggaagcctattgatggtcctaaatccaatggcccaggacatcatactgcagcaaaaatacacatcgagtcctcttggttttgctttcttttacagttgtcaaatgatccagagggtgactcttagtgtatccctgcattgcctagtctttcccaggcactgtgcatttagatttcagatgcatcagcagagaacaactacttctgcataaagctgattttagcaaacaaaacaaaaccaccaccaccgacaccaaatgagctaccagtttctaagtccatgttgattcctgaagtctacgttcttctgaaatcagtgaaaaggattcagaggtacttactgtggtgctatatgccatgaagtgtagccttgcccaggcaccatggtgaaacacagagcaggccacaagtcaccactgacccaggagaaaataatagcattgctttttttataggtcatcttgcccctgattatttttttctcgaagatatcttcactatccactttgggaagacatgagtttgccatttctttgaccagtgttccaccaaaggacaaagctgtgacagggcttggatatcattcatgtttgcagatgtagccaatttgcccatgacatcccagcaatgatagcaggtgcctctggattcaatgaaaagaactacatccttaacatttgacttagagcaatggtgggcttctcagagactcttcctctaagagttaataaatggatgcaaatatcacaaaaggaacaagaagatgcccaacttgaatgcctcattcctagccaagttggtggtgtctccatataaaatgggaggctcttgttcactactcaaaggcactgtgtgttggggattagcttgcaccttttacttcttatacacacgtgatgcttatcaagtatgcatctgacacaaaagcagagcgagcatcctaatattgaagatacccagctttgaatgctgacatttcagaggaaaaggtcagctcttgcacttttatctctctcatttggtaataaccttgagttgagccttccaactcctgcagaacagagataccctcgggcactttcaggtcaaagatgactttgaaaagtgcagagcattcaaagtgagagtcgaggttaagtgtgtgtgaggcagtaagaccaggtgtgaatgatgggcggtaagaggagttatattctctttgccgtgtcaggttaggaagacatcttgctatgcagtctatttttttctcatcaagtgtcactgtgatgttggctttcaatgtgatccccttaatgaccgtcctgacactctttcatggtgtcactcagttatcgtgaaagttactgcaggctacaatgctaagtcatagaggtattcaaaatattcacaggaatcagagaagggatcctgagtctctctagtcttacagaggtagggtagacggcaaggagcaagatcttgccaaaaaattgtactaccggtcatcagaccttgatccaaatctactagtttcagggctcttgtttttaaaaagacaagttctcactctgctacccaggctagagtgcagtggtgtgatcacggctcactgcaaattcttgggctcaagggatcctcccacctcagcctcccaagtagctgggactacaggcacaagccaccatgcttggctaatttttaagtatttttttttaatagagatggggtctcaatttgttgtccaggctgctcacaaattcctggcctcaagcaaccctcccgccttggcctcccaatgtgctgggattacagcataagatgtgagctattgcacccatccagcacccccccccccccttttttttgtgacaaagtcttagtctgtcacccagactgcagtgaagtggcatgatctcggctcattgcaacctttctcctgggttcaagcgattcttgtgcctcagcttcctgactagctgggactacatgcattcaccacttcactttaaagtcaagattttcaagcaactgacaagatgtcaatttggcaagatgatagatacacttaatacctgtcaattaagagaacacaccatgcatttagtgcacaaactcaaccttgttcatcacaaatagcatctgtgtccctttttttaaaagtatgcaagatttatttgtttctgtaaattttgtctataaaagtgccaggaacatacagattcatagacccccttgcaatgactttcaagcctccttagtttacaaccactattctaaagaaatgcagttttatgcactaaaaatctgttctttcctgccaaacaccggtggtcatggagccgttcttgttataggatacatttagtggcaggaatcacattgtgaagcatctgtaaacattctcattggctccctgcactggagcttagggaatttaggagggtttcctcttttgggtcatagttactgcaagaaactacagtttaactccaattcggtacttctcacgttatttggacatgagacatcttctttccttttggtgctctatcctgtctttgtcttcccactttgacaggggtttacagtgaggacaattacagagaaaaacagtcacaaagatctttgtgcttttccccccctttgtctcttgttaaatataggcatgggatttcaaagtcaaaagcaaaacaagacaaaaaagcaacctccttcttcaaactgcctaaaacttggcagtgatcattacaacgtctgtaaccactaataattcgaccataccatctgcaaccgttacatgcctaatggttactgcagatgactcattttatttctaatttgtatcttcagcacatcatgaagattggaatcctgattaccttttccaccttgtgcttcatattctttactttctactcattggaagcatttgttcccatgtttggcattaaatcttctagctcatctttttttttttttttttctcatttgagatggaacattccttgggcaagatatatggctacagtatacaaagcagaagccatcgtcttttaaaaataccggttgaggttcaagggaatggatctgttctgtgcagtggcattgatattaaatggttcattggaagggatgttagttttataggtggctactttttccttgagctttgtcttcacgttaggtatcatgcatgagcatgcattttctttacagataaatgtttgatgatcccaaaagaggaatatatggatttctaacaaattaattgcgatatattgcaccctaaatagaatgtttaacttaatatttaacatttaaacattctgggtttgaagtgagacaagtggattgtgatatatccagacttctgctacaacagatggatggatgttctggatgccttcacggaattgtcagaaacagttgctcaatgactacagttctcaaatttacacaacacccttgttgattccacagccttactttaggggtcaaaatacagaccctcttggccaggcatgatggtggcttatacctgtaatcccagcactttgggaggccgaggtgggagggttgcttgagttcaagaattttagaccagcctgcgcaacatagggagacccagtttctacaacaataaaatcaaaaaaaaccacaccaaaacaaaatataggtcctctgggcaggaaaatggtccactaaacctctctttattgtcacaaaaaaacagatcacatgactttcagcacatgcaaaggaagatttcaagatcactttttagtcacgagacgggcttgcctgtacttatgacgttaatggaaagttccatctaccatgatgttgtgagtgaagtcattatggggagacagggcatggtaccttctacttctgcattctgaacaggaagctgacactaagaaaaactgggatgatgcctttctttggccttcacgcacaatctttgaactaacctttacttttacgttttatgctgtatccattgaacatccctcacagtttttcagagaaatattgtttgatctgagaacatctaaaaatgcttggtaggtatttgccaaagtgtgtgtgcctgtaagcttctagatcttgtttgttttgttttttaagatagagtctcgctctgtcacccaggctggagtgcaatggcacaatcttggttcactgcaacctccacctcccaggttcaagtgattctcctgcctcagcatcccaagtaactgggattacaggctcctaccaccatgactgggtaatttttacatttttagtagagacagggtttcaccaagttggccatcctggtcccaaactccccaccttgtgatctgcccgcctcagcctcccacagtgctgggattacaggcatgagccaccatgcctggcctggatcctgctcttgatacagctattgagaaactttgtgtggatttgaggcgttgttgaatgcagctgaacattgatgttgagcaaacaaatgctagttatgtctgcgaatgagtcgtgtctatttaaattgaaaatgtgccagctgtgtttacatcattagtagcgaacttcccaattaaactgttgatactataaatatagtacacaactgtcttggaaatggggcttacatcagcattcttctttgggcttgtttcaccggctttgagaaccgtcaacctaacagcaactgccacagaagcaaactttgagaccacttcagggcagctgatgtcattgtttcatttagggaatgacacctgccaagattgctgtttgattggttctgtctcaatcagatcttattttaaaggaaatgtttttgggttgactgcctagagaatgttccatagatgacagttgcatcgcggttttggaagaagtccttttcaagcttctctttctgtaaatatatgtgcttctaggctcttatgcctgaaataaatatgatagcgtctgtggagactgaatattcaagggtggttggtatcaaaattactgcttgaggagttcacaaaactggaggtttctttactatgaaattcagctcacgtttgaatggcaaatccttcatttccccaatctgaatgttttcttctatttccagtgatttttctctgcctaaaactagggcactgaaaatgctctgtaaaggaatattctcttgaccaaaagatctaagtccacagattgcaggatgagtaagctgcacgtttgttggcgtttccattgtgcatgcaagcaatgtgacccctttccatgttctcttctgagtattttctctttggtttcttcctatcctttgcttctctgaacagaagtgctggtagttctttgtttcacaacttgaaatatgtgcgtctgtgattcccccggctgtatagtgtatgggtcctgaggaacgggcacatttctatggcacagaatgacaaacttttggttactttgtcccatagtcagaactatttttatttcaagattgggctgtctgtattcaagtggcatatacatttgtttctactgtttctgggagggtggatttctttgtccattccagaggatagctatctgtatgttctaaataatttgtttcttgaatgttagtaggaccctcttgacattcactctctgtgtctctggatactctatgactgaaacacatagtcaggcaaacctcccctgcttcttgtgtggtctttttgtttgttccttttttatcctgccccacccctcaccccagtcgctctgtccgctgccacacagaagcacgcgtaatgctctccactcaagggagagatggaatacaaaacctctgggggtcataaaggatgcaattaaaatccagaatgcagaagtgaatggaatgataggaaagctcaaaacaaaacaaaaaaagaggatggaaatatttatgttgccctgtttaatttttaatcactcaaagagcatttgctctcattctgcatggagataaaattcccattttatttttccctgggccacagtacatgattttacattaccctctctctcagttgctcgtacttatgcaggttaggctactgtactcaagaaatggccacaatacttcatgtgatctcagaaaactgaaaaaattccaaggttgggggaaaggatttcagatgatccgatgcccctagttctagagcccatacttcctgttttgaaacgtgatcaagaattgcttgatgtacatttctcactgggacttccagatttcacaaatttaaaaaatatgtaagacacagtcgttgaatttgaagttcaaataaaccacaagtattaagtataagtatgtcccaaatgttgtgtgtgacatatcctgaaaaatctgaaatttaaatttaaccaagtgtctgcattttatttgtctctatttataatctgagtctctgtttctggacttttcatagagcctattcatgctagttgtctaaaatctatttgtttaacaatgtggagaattatcttgagagaatttcagcccaagcactgatcacaactgctgataccatcatgatgatagtgcctagatagtggagtttgcttctgtgtttgtactttcttgctcatatgatagagctgctcctagattttatgtgagctaggagccaaccccagtcacatcacattctcactggacattgattatcaaaatcacatttcatcaagggtgtttctcccagtgtttagtgggatagaccagaaggatcattgtatgtacatactagccacttttaatctttgctgctcagtgcctgggaaagcagacatgcacacaggaaaaaaagaaaaatagaattaacctcttgattaatattttgtatcaagccttgccggtatattccataataaggagaaaatatgggtggttttattttctcttgtttcaagcacattaaccataaaacataaaatgtgtatccttggtattaaaagagaaaaaaatggacgtgggaaacaattactactgtacatagtaatgtctactgcatttctcttcttgcttataagatatttctatttctttgcagcaatttggtaaaatcttagatgttgaaattatttttaatgagcgaggctcaaaggtaagcaacttaattcactttagaattgtttagtttatttttaaatgtttgttatgaataaggggaaacaactgcactgtcttaatcagctcattgtgaaaatacacttcagtgggaattcctttagagaccaccttccgttttcaaaatggtgggaaagacatcgggttcagtttaaaatgtataaggggataattttaaattgctgttttatatatatatcaagtttccagaggaaaattatacatgcttaaaaaaataatgatgttgctacatttttgtttttcagtgataattatgttctttatattaaaaagtgagttgatagtctcatgagcaggtaaatatgtgattattctgtattaataaagtgcagttattttcctgggttgtaggggagaaaaatctcatatacaccaaccttttgaatgtaattttattctttagtatgtttaccgatccacatttagcaatttgccattgctttgagtttgttttttcaaggaaaccaatttttaaatagattccctagtgctaataaaagtcaggggctctatggagaggtttgggttcaggagaggttctgtttcaaaacagaaatatgggctgggtgcagtggctcacgcctgtaatcccagcactttgaggtgggtggatcacctgaggtcaggagctcaagagcaacctgggcaacatggtggaacctcgtctttactaaaaatacaaaaattagctgggtgtggtggcatgtgcctgtaattccagctactcgggaggctgaggcaggagaatcgcttgcacccaggaggtagtagttgcagtgagctgagattgcaccactgcaccacagcctcggtgaacagagcaagatcctatctcaaaaataagcaaataaacaaaagaaatatgttgggagaagagaaaaacagaaacatttctaaaacctcctctctatcagtggctaaccaagggtggtcccagaccaggaatatcagcatcacctaggaactgattagaaatgcaagttctcaggctccagccctgatctgttgaattcaaaactcccaagttagggctcagcaacctgtgttttagctccactgaggaaaacaacacatgaggcctataagcagacacagggggttaacagggagaatgatggagaacaaagatgtggatcttggtaaccagaaagtgaatgctttcaatagctctgacgggtctcctggctgccagtccccaggctattaggaattttaagttcccttctccttgcatcctcagactatgaatgcaaatgttgagagatagtgatttcagcccattgactctccttacacaggcgatttgaggcaagtcggtatcacggagggtcagtaagcggtgctggttttatttgaagtgtcacaggccacattgccagctcttttggatgtgtataaccatctttcccccataaaacaaacctttgatttttttttctttattccttggacagccttcctccctcctaagtaaatttagtactaattaactaggatgatgttgatcatatcaaggaaagaaaaccccagtattttctcctccatggccagagtgatgttgtaatctgtcagatgagcaaaaacaaaagcaaaacagaatcccttacactttgtgataatactccttcagggaccttgtcatttttccatagctccagatattttacaatcgttctcgaacttaagtctcttcctgcttcttgtaggaaagttattacggggactattgctatacctgcaaagcaaagtgcattgagagaaaaatgtgcccagcctaattctgttcactcgagccttctgtattcttggcgaaattgtagatgacccgaatgttgaccaacttcgttctgaccctaggtctgtctatagcagcactgccttcaaagatgtgttgttgttgttgttttttaatatgtttaatttatattttgttttgtaacttttgccagttacaatgaagaaagctgtttaattccttctgagagctgttttgggacattagaagaatatcatttgccattttgaaagtacaatggtgatactgtttttaagacatcttccgtcattcccatgattagcctgtctctgggggcttcaggaaaaagaccatttaagtttgctgcatccagagcctgactttgtgaagctgcctttttttggtctttattcttttggtttaggaaacatccaaaatagcctctctcggtgggtatgcgccctctgaaagagcttgtcttgcaggtgttggagctgactgtttaggtactgctggaatggcactgagacagtccagttgggactgctaaatgggggcagcagctcacacagggatatttttcatagttgacattatcctttatgggaaagggccttatttagaggagcatttccattttaatggttcagaaacctgaactgttgctatggcctcattttcatcgtttggtgctggacagacagccaggaaatgagtgggcccttacgagccaggaactcaccttcttgcctttcattctctagagcagttcttcaggcaggccactcaatgctgaaggctgtgtgtgctgggtgtgtgtgtgtgtgtgtgtgtgtgtgtgtgtgtgtgtgtatgcggacatataaacccatatgtacttaagggatggacgcagtgtctcatacctaacattctagccctttaggaagctgaggtgggagtattgtatgaagccaggagttcaagaccagcctggacaacagtgagaccccatctccacaaaataataatttaaaattagctgggcatggtgatatacacctgtagtccaagctacttgggaggctgaggcaggaggattgcttgatcccaggaggtcaaggctttactgagctatgattgcaccactgcattccagcttgggtgacagagtgagtccttatctcagaacaagtatctatattactttggaatatagatccagtatctatattccaggtagtatctatattattttggaaatgtatataactcaagtatttaatgtatgggtgaatagcaagaatgcagaaaatccacattttaaagagatgtcagagagaaaatgagaattcgtaagcatttaggggcgaatgatcctgtaatttatttttcctttttacgagatttacccaaccatctcgtttacctctgatatggtctatttaagggctgtatgcagatatagctactccctacgtatatacttaagatatctggccgtgtgcggtggctcactcttgtaatcccagcactttgggaggccgaggcaggcggatcacctgaggtcaggagttcgagaccagcctgaccaacatggagaaaccttgtcttgactaaaaatacaaaattagcagggtgtggtggtgcatgcctgtaatcccagctactcgggaggctgaggcaggagaatcacttgaacccggggggtggagattgcagtgagccgagatcaagacattgcattccagcctgggcaagaagagggaagttctgtctctaagaaaaaaaaaaaaaaaaaaaaagctacactttgatctttgattcagtagatatcagtaagtatttgctgcatttcatgagagccaaccatgagtaagacagaagtacttcctgtcctcctgggctttcctgagtagcaggagagatggactaggaagatgagtgactgcagtagcctgtgctgttctgcggtgatgggagaggccactgagagtccggacaggcaggctgatattgtgagaaggcttctggaaagaaggaacatttaagctgagagtgagagttgcgtaagaatttcccagggaggggaaagagggatgtgtctcaggcaggagaagttgcatgtgcaaagatcactggagtaaaagtgagatgagagggctcatagtcccatcggaaaatgaatcttcagatgctcatcaacagctcccctcttctaaatatgaattctctgcaccagaaactagaggactggatttttcatctaggatgaaaaatcagtaccttcatccatccagggtgctttatttaagtctttaacatataaaatggtgtatttgcatgaatgcaaaaaaggaagatatcacctaaaaatacaaaagatgaaaaaagaacaataactaggatacaagaggatcagaatgtatgatttgcgaaaatattttaaagtaagcaagtcacgttggtctggcaatcctcttaaggtccccgttatctgccctactgattatacctgctcatgacagggcacaggccaccaatctcttttcttcagtagcattaaaggtaaactctgggaaggtgtgtctctgactccccttctctgtaccccttcttgcggtcttgattttttaagcagttacacatcagcatcacacccagccctttgccgagcaagccaagctcagaatgtgcttgttttgttctcctttttaaggcagaggtaaaaatattcatcatctttttaaaaactgcaaattgctgcttccctgagttagaattccgaccatgaggcgggtcagaaaaaacaaccttagcacccgctctcaaggttgcctggcacctgtgcatcgtggcaaaggttccctgctcatagagaggaccaggtgaggtctttctggttacattgcaaccctcaggtgagaattttgataacctgataacccagggaggccatgccacttcttgtctgggtgggaggtagaattgcccaacggaacaggtaggaaagtctgtctggcattttgaggaccgtctggagcacattctttctgcaccgaactttgtcaaatctcaactctaaatgaggaataccaagtagctgacaagcaaagagagaaagaagtttcgcagaaaaacaatgagaataataaaaaagaatgtattctctttgcttaaaaagtgagaacttgagaatagatgaggctatttcctttttagttcatgccccttccttgggattcaaaatgtatttctctttccacctttgtctttcctaaacatacttaatgctgatttcggggcagtaggtttgccttgggttcagacatgaagcatgagagcaaggttctggagtataatgttggacaggagggtgagtgttcagtctcacctggctgtgttcttcccagtgctgtggtaataatgactgctagttccaaagggcagaaatgataccacctggccctccagctataccagtggggctatggattttcttttcttgccgggagagaatataaatccaaagccctcgtttctctgattctttttggaatatgtggcatggctatggttgctaggaagttaggcccatcagggaggaagagaacgttgccaagaagcctgggacatgtgcttttggctgtacctctacatgtaagctccaagtaactgagtcaaaatctatagccaaaaatctatagatatcagcaatataaaattctatttattacaaaggatgaaaacctctttttcagatagggtgtcacccaggctggagtacaggggtacaatcacagctcactgtagcctcaacctcctgggctcaagcaatgaatgctcccacctcagcctcccaagtagcagagacaataggtacaggctgtcacacctggctttttttttttttttggtagaggtgaggttttgccatgttactcagcctggtctcaaactcctgggctcaagtgatcctcctgccttggcctcccaaactgcttgcattacaggtgtgagccaccatgcctggcccaaaaccttcttttgatggtttcgatcacacgtagtgaaatgagaggtcatggaaatcaaatcactgggccacacattttaagcaaacacatttctggactccagtctgggattctaatccagtggatacaaagcaaggctcaggaatcttaatgtttaatgtcctcccaagttccttctgatatgcggctaagtttgagatatactggccaagagttagaactgtcaaatagagcaaaatccccctaaattctctcttttttccctttgaagaacaatcatttccaaactatacagttggcgagtgtatttgcatacccaatatgggcatactttgtgcacaagactaagcaagacccttctgttatggagcaaataatcttaaatgaatcagataattcaggcttatcctaatcacagagcctcactatgggaaagattatggaaggtaatttggttcaatcccctaaagtaaagaaacgttatttttctcgatacagttcacccttgaacaacacaggtttgaactgtgcaggtccacttacatgtgaattttttttttttccaaccaaaggcagtattcccaggatgtgtggcctgtatatatagagggctgattttcttctatactcacattccacggggtgactgtgggacttggaaatgcaaggatttgggtatcaggggtggggatgtcttggaactaatctgtagtggattctgaggtacagctgtctatagaatcccgacaaataatcatctaccctcacttgaatacatccacatcccctgtcttctgtggctgatgagcctattccgactgttgaaaagttccgttagccagcccattgcacaatactttttttgttgttttattatactttaagttctagggtacaggtgcacactgtgcaggtttgttacataggtatacgtgtgccatattggtttgctgcacccatcaactagtcatttacattaggtatttctcctaacgctatccctcccccagccccccaccccgtgacaggccctggtgtgtgatgttccccgccctgtggtcaatacctctttagccttaaatttggaggtgattatagagaactaatgtaggactgggagttatcaccagttggttataactaccatgtatttgtaattattgtgcatttctttagtaaaactaagtattatactgtcccaactcaacttggagccaacaaggattatttgatgctaagaggagccccaacatattgcatgatttcacccagtttacagtgaaaaatctgaaagagctgggtaaatttatgtggaaattgttcgaaaggttggtgtatatttctgaacaagatgtacaaatatttttaggggctttaaaaataatgtgtcgtattttctgtacttaggaacaatgtcagtgaagacaaaatacggattttgacaatatagtttagtggggttgatttttgaggctgaaatattaaaagccaatgtacctgtggtaaattaaaaggtatatatgttatctatcagtaaaagaggaagtggccagaatattattacaaattacattctattaacaaagtttctttgctacctgttgatatgaaaaataaatattgacctaatgccagaactttacaatatgggtacacctttccctttctggttaacaaagtaggatggaaggttgtcaaattcaaaagcgtgtatgcaatttgaagagtggggaaagtatgagcacaaacattgaattgtttgtattattaatcaactgaagtttatttctgttcatttcatgtgacttttttgtttattagaccaaagagtttaagatttattataaaaaaggtctttccttttttaggcttttaagttttatttttgagaagtaaaggctgtagaactgacaaatttgaataaccctaaaactgcatgaagaagagatgttcttaaaaccacacggcatgactctgtaggcaatgttagaggattttggcattcattgttgaatttcgtgcacacgttttattttattttatttttaatttgcatgtcaaaaaagtggttcccttttcttttcctcattatttcattttattctctgtgaagacactgtaaatttattttgatctcattttcttttcgttagatttattttcttctgtagtgacatttagaaaggtatttttggtatccttctttgaatacttcaggggttacagctaactggtgacagaaaaaaatatcttgttcacatttgtcgcttaattattgcacatctcagtactcttataatttctctaatttgcatgttacagaactgaagccaggacaagaaatagaaattaaagcgagagaacattaccaagtggtcgttgactgaaataataatctgcatgttgttttcccttctccctcctgcatgcagggatttggtttcgtaactttcgaaaatagtgccgatgcggacagggcgagggagaaattacacggcaccgtggtagagggccgtaaaatcgaggtgcatgttcaaaatattttccttttcatcttttttataaatgtctgcttcacgctcattcgttgttccagatgcatcattggcgtcttgtatgtgaccctattccccctcattgtttatatatatatatatatttttatatataaaaaggaaaactggccttacttttttttttaattttactttattatgttactcttataccgctgaaaggtggatggcaaacgtgagacaaaagaaaggttaatcggaaagtgtttttttgttgttattttccatgttttataatcaatgggtgcagtaggttccaaagaatagacagtattgcaaaccaaacaaaatacagaacagtttctttttctttttctttccacttcagggttgaagagggatccacagtggttggcaaattaaaccaaattgggaaagcaaaaaagattgtttttttgtttgtttttttttgtttgtttgtttgttttttgtggaaaaaaaaacaaaaaaaaaaacgagaggtttttactaaacctctcgtttttttttttttaagaagccagtttgaatttctgtattcttttgataacaaagtgaataaccaaacaggatttcctgttcaatatctggcccctgttcactgaaagcataaataccaaaatactgacattcagagtctgctatttgtcccactgggatctcccgcaacatagccacagggtcatatttgttaattttttttttaataccagttacaaatgctttagtctttggagtaagatgttgcatattttgcctttcattttccccttcgacgataacgcttaggcccctcaccaaactctcagtaaccatggtaactgtatacaaacccatgctggcgatggtggtgaatggtaagtggtgaagtccatctgccgtttcacgtatttagtgctgatatatctatatacatatatatatataccacgtgaatttttttgacttgtcgtattaagttttcttgatgctctatttttttggatattggtacgcctgtaattgagtgtacgttctaagctagcctgggaggcactgactggattgagttatgaccggtgcacatcttactcagattgttaaccccatattgtgttaaacaatgcaccctctcttttatccttttgttagctgtgacgttaaagcttgaatgattttgttaattcttgcgatgtaaaaggctcttgttccaagtgttgaatgctagatgttgctttcctgatggttctttcctcctaaagtgttgcacacggctaagacttgtttgtccctttttttgacatttatgttcccttgtaccttgtctcttctctcttctccactgcatgctccttcatatgaattttattttatgtttaaaaaatatttcttgtttctgtgttaccatggagtacacgcatgcttttaaatcttcaattatgcagaatcttttaatttgcttttactgtccctttattaaacactcttaatgatatgacattgctttattgaaatgatttgtaagttaaacggttatgaagtaaatgtaattttaaaaatgtatgattttgttatgcacctactgccttttataaattaaaatgcattttactttttagttttcttttttaataagtaatcacggtcataatgcatgcaactaattgaattgggagctggccctagaatatgtgcttacttgagttttctatgtacataggtaaataatgccacagcacgtgtaatgacaaataaaaagaccgtcaacccttatacaaatggtaagtagagattggccttttacaagaaattctctctacttctgactctttaagtaatttaaccagagattctattacaacaagctgtgtttgcctgggcattgacactgtgtttttactactgacctgctacagtgaaccacctacatcaataagatcattttcacaacaaaggcaaatggagtgttcaggttaagtgtgcctgcccttcttcccttctttctagaataactctgtttgggattgagatgcactaattatttggaaattagtttgctaatttcattggttattacagtaagttgaggggagaattggaggtttagtttgtttgcttttcaataccatctgctcgttgattactaatcattcctggacgtgcagtcacgtaatttattctgtctttgagtcttctccagagagattagtcatttgaagtggtttagagtatacctcatgtctgaattccacagggttagcagaatgtgtgagtgggttatttgttcttctctgggctgctcagtgttattttgggctagttgagaatgttgctttgtattacagaccccatcaggacaatgcaatttctgtttttatcaataaaacttctgaaaactcctcctaaaaagcattcacatatgagttattaaaaatgtttgaacattttgattctttaattcctctcaaaataagtatctcttaagatatatggggaagaaacctgccactgtgttaatcacatacttaattgtaccaaaaattaaagcaatgcagtaagttaaagtatatacacatggtagaatattatacccattaaaatgagcaggataaggatcataaagggtctcataattaaaaaattgacataaatgtttgtcgcataactttagataaatgatgataatatgccagaatgctaatggttgtgctgaattgtgagactggcaaacattttttctttgattcaggttcataaaaataatataactttattacatcaaaaggagatatatggaattttatacttctaaaattttaattgcacatggagatacggattttttaaagtaaaaaaaaaattaaaagaaacgttaaagacaagtctaaaatatattttaaataaccccattgccaccctggtttcctacctcccccctcacaggaagccgctattacagattgttgtctatagttttattttgcgtattcatgcctatatatgtagtaggtgttcatttatagtattcatagtgttgtatacatttttatgtgaatgatataaggatacacctggcatttttaattgggttttttaataaatctatatagagttcctttaatttaatatatacagattagactaattcatttcagtggttatgtaatattacacaaaacagataaataggttcagtcagaactaaatactgattgtttatcacaataaaagaaaacaatgatctagcaatgtattatcatttggtagttttgattttcctgtttcttttgccagtgactaccaatttgacagtcagtttgctcttaattttaaaaggggcatcattcaacagggacataccgtctatataatagggctctaagttgaaagaccagaagaattacctattctgctatttttctcagctttgtcaaccaagacatgcccttaaatggtatagactattttcacaccagactttaaatgcccagtgctgaactgaagcaaacctctgatttatatgtcatacagcctttccagttgggtaaaagtaatgactctgaaacttgccagatttcatatatggtgacatcaacctgacggttgggcatagtctttaattatgaagttgcactggtgcccaggcacatgtgtgcttgtctacatatgactagctgctcatgtgtgctgagtgagaaactggagcgagaaaagccaaatatttcataagccatgtgcatgtatatttattttaaaagagttattgatcaattttatgaccagggactgaaaactagacctgtaggattttttaacacaattcaaagcccatttataaataactagcctttctggaatatgaggtatgcattatgtgaggcattttaagtgcactggacacaaatgaagtcctataaagaggacatcattatccctattttagaggtgcaacattgaggctagagaagatgaagaaattaataaagacttttttttttttcttttttttttttgagacagggtctcactttttcacccaggctggagggcagtggcatgctattggctcattgcaccctctgcctcccaggctcaagcaatcctccctggtagctgggactacagccacatgccacaatgcctggctagtttttttttttattttttgtagagacggagtttcaccaagttgcccaggctggtctcgaactcctgagctcaagtgatgtgcctgtcttggcctccaaaaatgctaagattacaggcatgagccaccacttctggcctagccttttctttttgttatgaagtaacaaaatcttgtgaccatgcctgtgtgtatcaggcatcgctttccctttgtcttcttgtagaaatgcactcaagtggcaaccaactacaataacaaaaaaattattaaatgtgcaacctcgtgttcctgccagattttggcatgcacatcccatgtcccattccaggtagccatgcactcagtttccaggaataagtcagtcatatgggtctgtcatccacgtacctgcaaaagggaactcagagaattgttcctgtcacacatactgtgtatggcacctaaggggttgatggatagacacagtagaatttatttaaaacacaaatgtcaattctaattatataaagactttggcttctgtagtggagattatggagaactttggtgttcaaagaaaagtagttctccaagctatcccaagtttcaactcaggagtatcaccactacagataaattcccttaagtggcaatacaatataactgaaaaaatatagggccctttcatatccttaataagcaagacgatagagttatggcaaaagagggtaagtcgggaccaataaagtcacattgaaatgagaaaattaagccatcggtgaggttcactcattagctacataattcattctcacaaagcatagaaattgtacttcagcaaaattataaattactggagctatcaaagtttcaggtcatctccaggtgatgaaatatagttatcaatgccagcatcaccttcatgcattacttcaatcatgtatccagaaaaacttttagcagctgcaaagtttccagtgataaataagactgaattctaaatgtgatgagatacctgtccattatagagggttacagttaataacatggagggtgtagatactattctcaggatatttaaacaatgacataatgaaaagctgtagaatgagccgtaggcttctggacattctattaaaaagttccacaaagaggggattggactatttctctattgctatttctctgaaggacacctacccacacggaggagttggggtttgctgtgttctttggggatcaaatgttggatctgcaatacaagattgagagctgaattcacaaggatttcctggatgctggggaagcatgggtgctagacatggctttttcattttcttagagatgttaggaaggatgaaaatggggcaaacatattcagcgctccagagagaggcatactttgttgcccggatcagttcttccattcactggctcttgaattgtaggaagttgtttaaactctccatgtgccagctctctagtgggaactgtacaaatgatgggaactacatcacagttctttgtgataattatgagagaaagtgctcaacacaatgctaggtatgcaaagtggcctaaaagattatttttactactatttatagcgcagtagtatttgattacacatagtttcaatattaagtcatcatattattcctttattgtcatgggtagttgaattccctgagagatactagtttaaggatcaattcttcagatgctaaaaggggctgaacaggtaaaatcagcaaacagacagtctttgaaaaactcagtcttttgggactagctattgttttcttactgaagtaaagcaaaatatttatctacgaggaaaaatcaacaccaccaccaccaccaccacgaattaacaataaaagatctcaaacatttaatctccctatcagtctcacaatggggagcagtggtaaatgtgactaagtggggagttgaatgcagtagcccttgaccacctctaataagtctgtctgtgaggcattctcaacttaaagttaccatttctaccgatgtttcaagagaaatagaaatcctgtattttagacggaatttaaattttggcaataaatacacgccgttaaagaatattcagtgaacccaaacaaaacacctttgtacccagtgcgaacctcacttctttttgtttggtatttgagagttgccacctgtaccatgtcagctgccaggtctctgacatccttagtatatgtctttagaaagcattgacaggcagtttttgtaattcctgtagcgtacataagggtgctctctggaatgcgtttctttgatatgtaacccagcaaagccttaagagaaagcctgtgctgatgttttttgtgtacacattcagacttggccttttaacacccaatgcagtcatagttaacactggaggtcttaaccagcatattttagaaatactgacacttgacctttgacaagctaaatttggggaggggagtgcaaattcagatgtggccccttgagtcctggccacggaggggtctaaactgcttgcgtatctgatacagagccagaccccaagacgtctgttctctggctccattgccttgttgtggggctgggggggccctgggaggctgggaccagtgggccttatcagccattctccttttgttgtaagcctcattgttcagtttaatgtccttgatcaaaatctctgaatttgcaaggcctggggacatacacaaactgcctaagaaattaaaaaggggatcattttgttcatcttcctgacagtgcaggctcttatctccagcagggttatcccaagggtctctttcaggtacgaggaggagtcacagggaatgtgggttcatttgcatgtgatttgcatatatttacataagcccgcatgagctctgtaagtctgagtggaggcgattttcaagggctggattctagaccaaatggacataacagacatttacagaataccttttccaacagctgcagaatacatcatctactcatcaacacacggaacattgtccaggataagccacatgtcaggccaccaaacaagtctcaacaaatttttaaaaaatctaaactatatcaagtattttcttagaccataatagaataaaactagaaatgaatagcaagaggaacttcagaaactgtacaaatacatggaaattcaacagtgtgctcctgaatgtccattgggtcagtgaaggaattttaaaaattcttgacataaattaaaatggaaacacggcatgccaaagtctatgggatacagcaaaagcagtgctaatcaaaaagtgtatagtaataaacgcctacatcaaaaaagtaatttcaactaagcaaccgggacaacagtcatccctaacacgattcttctttatttaatgtagagtctatggaaggaagcaggtccttgaagattggaaggagacataatcagagccaaaaaaaaatttgtctattaggaaaaactatattcctttagtttctttagagaaaaaccaagtaaatatttatggaatgcttactttgccaaacaacattttaggtgctggagattcatgttggacagcagtcttgcctgcttgactgttaattttaatgagggagaatggttataaaagacaagagcaagcaaagaaagaaagaagctaaatccagatagcattaacggcaatgcagaaaataaaactgggaatggaatcatggaatccaagagtaactctaagaggaggtgggaaagtgacattaactggcatgttctgaaaagactccagagccctaaataacatgaagtcgactttgtgaaaagctagagagttctccaagaagaaggagaagtggatacaaagagactttgatatacggtggtcttggggggttttataaagatgaaaatggccagtgtcactgtagctgggagagacggggaaagggaaaaagggaagtggtaccaaagaggtaccaaatagtttggttaatggttagtgtgtgctgattgactaaggtaagacatgtgtgcttatctcaaattgggaagaagctattgaattctgagtatcaggatgacaaagctgatgttttttttaaaaaaattgctttggtcaccatgaccagaatggacagggggaaggaggaggaagaggagacagtgagaattagggcatttctgctgttgaacttgtccaggcagagataggaatgccttggtctgcagtggtggcaatggagaagaagggaaggacttttcaagttttaaccaacaggattttctaatggatcacacatggggtatgagggtaagagaagaatcaaggaagtgttgatgaattttattttgagcaaccaagtagatagatatgccatttgctaaagggagaaggacttgctgagtaacaggtttcatgagtggggggagaagagggagactagaaattgggttttcattcccatcgcagagttcagaaaggtctttggtctccaacagtgggagtggagtagccttgtttagaagggatcaaggatgggaagaaggttgacacctgcactcatgttcccatgatgacccaagcatttcattttgcagcacacagattcccagctggtttcttgtagaggagactttatcaattacctttctcacgattaatacttgcaaacatgagatagcacagatctcctgatgaaggagagtatcatttattttctttatttttttatgaagagattgccatgtgcagacttggcaaactcataacttgcagaaagatggggaaataaacagcagattatagggggatagacagattatagatacgtttatagatagatcagtagatagatggataggtgggtaggcagatgagataaacatgatttctaggtagcctcaaatgcctctgagagatctggaattttttgctttgttcttagaaaatgagagatcattggcaaatttataatctttaagagctacaccaaaattcactgataagtataccttcagtgaaaaggaaaaggaagtcttatatgcaaaagaaagtatttaaggtagtaaggatattcaagaaacaagacctgagatgcacagtatgggaaagacaccatctccactaccaataagaggtaggagcatcagtagagtatgagatgggtaacagtggaaagatgaagagtgatcacttaataattattcatttaatatgaccccatatagagtttacaaattctaggtttctgtgaaaaactagaaagaaagaacattaaatatgtctgcagctttattttcaactagttttttgtactttttcttagactccaagttgaaatgtagatattaattcccatatcctcaggaattagacttttttttaaaaaaaggaagcagtggaatttcagttgatcaaattgaagtcatttccatactcataaaacacattctgaaatgtctgaactaatatttatttttacgtcactatagaaattcttataaggcaagatgtgattaatacaagagaagagggtgtcagtatgaaatttcagaaaccgctagggcagtaggtctcagaatttcatgtttctttctgtcactctaaaaagggggcccaggaattaaatatgcctcccaggtaatagaagtataacactttgagaatctctattctgagatcatcccgggggctgtaaaccacctagcttcttcaggttggaactgaaagttcttagaaaacattcttatcaagttttagaaagttctggatttcgatagacatactggcctgtctgttgagttagtgagcctctgttttccttagtggatgttaagaacacctctgggctattcttagttcgggcagaaaatcacacctctctcttctcggcaaacctcagaaagttcttactgtcaaaaataccttccttcacattcaaactttaatcattgccttctctcaaaaacatttattaaaggacctttggtatttggccttctgctcaaggactcagagcaaaggactacacaccttaccctcctctgtctttcaaggttttttttacttcttgagacagagtctcactctgtcacctaggctggagtacagtggcaccatcttggctcactgcaacctctgactcccagcttcaagcgattctcatgcctcagcctgattagttgttactactttgtatttttagtagagtcaaggtttcgccatgctggacaggctgctctctggaaactcccaacctcaagtaacctgcctgccttggcctctcaaagtggtaggattacaggcatgagccacggtgcccgacctgcatggattttttttttttttttttttcccgagagagtctcacactgtcacctgggctggagtgcaatggcgtgatctcagctcactgcaacctctgcctcccaggttcaggtgattctcctgcctcggactcccaagtagctgggattacaggtgcccactatgatgcctggctaattttttgtatttttagtagagatggggtttcactatgttggccaggctggtctcaaactcctgacctcgtgatctccctgccttggcctcccaaagtgttgggactacaggcatgagccacttcacccagcccgcacggatgcttttatgaagacttagccagcaggagcaggaaacaataacaaaaccctaaaacgtgatcagtctctggaaattgttcccctaaataatgcccagcatatatgtaatgtgctttccaatttgagaatattcttgtatgctctttttttgtgagtaaagatttctaaagggtcaggattcattttacaaaaaactctccatccagaacatttggaaaattacaggattccattaatcatatatacagattatttgaaagttaccttagatatcatacattgattaagaattttttacagttcctgaatgcatcaaaatgtaggccacagtaaatctctaggggataaaatatcattttctttggtttttatgaagcactttggaattctctagtatctcgaggttataatttggaatgacaattgttagaatatattgctgccaagaattttgtttatgcaagctttctaatttttgtgaacttaatgcagaggggtgtgatggattatctagcagtgatatataaaataagaaaaaattaaaattattatagtagttctaaaaaatattgatggagtagaaaattaattaccatgtcattttcaaagggttcacttgtggctggtcagtagtttccattccattaacttgcactggcagaaaatcaaagaagggcataaatatattttcttatgtgtggtttttaagtatttttatgcatgcccaaacgacacctcctttacattttaaaatacaaaatgagatactttaacccatttgatttgtgattcatttgcaattatataagatgttgaatcaaatgtgataataatgtttttgtgtatttgttttaaggctggaaattgaatccagttgtgggtgcagtctacagtcccgaattctatgcaggtacagagtttctctttgcacgaagtcttctcagtcttttctaaatgtgctttgcctgccaagaatgaatgagttttgtaaaataacctgaagcaagtgaattcctatcctaacaagttctgaatgatttctttgggcaaaatcaagagtgcttaaaacagtttaaaaattacaagggaatcgtctaagtttcatggttgggggatcagcgtggagccactgctccttaggacaattcacattgattttgccctaaaaaaagcattgtgactttgttcaatagtgtattgaacaaatggagagctgctcacacccattgtatttcaatgtgcctgaatgtgtgttttagccatacatttccatttggggttggcattttctttttcctggcaaagcagagagtcgagttggcttaattattccaataatgtgggagtgatttagaattgccaagggaaggcctttttcgataactaaaaagttgtccgtcttcgttcattaatcaaattcccttagcaattccttttctctctactttgccttccagaatatgtctctctcctcaccccttccctgcctaagcaccaattacctctcagctgggaaatccattctcttagaaattttgggagagcataacccagaagcagtagtggctgagatttcatgtctcgatgtcctcggcttggcccgtcactactgcctgtatgtctccttgctcttgaacaaggctgcattgaatacctaggaccttagtaggtttgccacatggctatttaaaagaagtctttctttgatgtggctcttgctttttaataaggagaaataaataatccgttgacctagagccactcccttagtaacctcttgacggtaagtcataccccttgctttgtttcttcctgggctgcctaacttttgtcattttcctaatactgaacactgacccttgtagatgagaaaggaacacagaaaacttagctactctggcacaacaaccagtctgacaaaatttaagttaaaaatctggtaaatctggaaaggctcaacaggataactgattcctggattttacgtaggcgatgtttggagttgttcttcatgtatgagttttaccgggagcctgggttaagtccagggattctaacactgcaaaatagctgtgttcactcttgtgggggaagagacttagccgtcaggctttccatgatcatattgcaaaccctaccacctgagaagacacctctgctgagtaaggaacatggaaaccatgcctacacagctcgggttcaaattctgcctcccctactcaccagcagtgtgactctgggcaagttacttaacctctctgtgcctcagtttcctcatctattaaatggagatgatagtaacaaactcatagtaatttattagaattaaatgggttaatatatgaagagtggtgtgtagccagcaccgtgtaaacatttagtaaacaaaaatgaatatgttaatctctttaccaggaaggcaaagttagctgcatattctgctgaattttgagtatgctatgagacaaagagattctttccttcattgatgagagtactagtccttcagttctcagtgtgttcatttagggggtgttaatttctgggatcgggggcatggcagtttattcaggggacacacagaacatggcatgtattgctgggatgcatctttgtgcaaagctgcaaggaaatcaaatactccaaatggttgaaaagtcagacaacagcttccatgtgtccgcagcaggcactgcccatgaatggagtagttagactaaagaaatgtcagtttctcctatatgcacatatctgagtgcatattttcagcctaaaatagtccagtgaagaacaagaagccttcttgtggggaggaagggtatggatgtgagtgttgtggtggagagggcaaaatgcatttttacatttttctggtcctgtgcgatggagttgccagtcacccttgggtctattaagcaggaaaatacctaatatccccgttacttgtgctttcgtagccacagacatatctgtgggtgttgaggaggacattaagatgagagaaacagttaagactgatttgtaactataagaataaattcatctgcatgacttctagaacattagagcagctattcagattagcccagggcccaggttcagaagttagatcattaagttagaggaaaagaaaatgttataatgtaagttaatatttactggatactttctatgggccagcactgttctaagcactgtacataagtttaatgtatttaatgctcatggcgattttccaaatgaggataccaaaatgcaaaaagttggtattactgctctgagatttcagctggtcaggaggaggccagattttgaaatcaggctttgatcatctcagaaatcgtgttctttacaaccagttgatactggtggggttttgtttgtttgtttgtttgtttgtttgttttgagatggagttttgctctgtctcccaggctggagtgcagtggcgcggtctcagttcactgcaagctctgcctcccgggttcaagtgattctcctgcctcagcctcctgagtagctgggactacaggtatccgccaccatgcccggctaatttttgtatttttagtggagatggggtttcaccctgttagccaggatggtctccatctcctgacctcatgatccgccctcctcggcctcctgaagtgctgggattacaggtgtgagccactgcgcccggccccctttttttttttttttttttttgaggcagttttgctctgttgcccaggctggagtgcagtggcatgatctcgactctctgcaacctccgcctcccgggttcatgcaattcttctgccttagcctctcgagtagatgggattacaggcgtccaccaccatgcccggatcatttttgtatttttttgtagagacagggttttgccgtgttggctaggctggtcttgaacttctgacctcaagtgatgcgcccagcctgtttatttatttttttttttaatattaaaggtcatgattccaatcgactgtctcctatgatcatgctactgctctgtgtgcaaaccagtgaaataaaagaagagaggtaacataatcattctgtatgattccagctgccaccaccaccaccatattcacaagtgttacatgacaaatctgagtatctgtgtttcatgctgccactatccggattatccggaaaatccacatgctttcctcttttcagctgtacgtttgtatgtaggtagacagagctcataatattcagaaatgtggggacatgtagctgtaattttaacactgcagagcaattcctttgaaatatttgaagacctgcaaacactgaaagtctggctggcttaaatctgaagtttcaggcacctgcatctatggaatggacctatgcaaagcgatagatgcagagtgcattcatttccatatccaggtataattattactgtcacgcatctacagatccatgactaagaatttatggggcatttaaaatttccccagctataaaaatagtctgaatttatcttgcaattctgagtgtgcctcaaagctgaaatgaagaccccttgtcattgatttgctttgtatttttagtaggctggctctgtatctgcttaagatagaaagccagacttattagtcatttctctatataaggttgtgtgttaatgacatgttttataatattctcatagtgtaattatttgattttctgaagcttatgcagaattaacaacccagcctcccgttgtctctcagaatgaggcatgaaaagttcacatattttgtaaattaaaatcaatattttcaatctctcctaaaggtaattttcttagtttagtagacttgtccctaacatttattttctcttttaattataaaatggcaagttattgaccaggcgtggtggctcacgcctttaatcccagtactttgagaggccgaggagggtggtctcaggagttggagaccagcctggccaacatggtgaaatcctgtttctactaaaaatacaaaagatctagctgggcatagtggtgtgcccctgtaataccagctacctgggaggctgaggcagaagaatcacttgaacctgggaggcagaggttgcagtgagccaagattgcaccattgcactgcagcctgggtgacaagagcaaaactctgtctcaaaaaaaaaaaaaaaggcaagttattgatttttgtatgtaatgttttgactccccgagtatgtttttattgcaaacttgggtggggtgggggcgaggcaggaagagccattgcacttaatgaggacctttaattactatttgcattgataaattatgacattccttctccctcacacgtgccttccagaggaagcattgagaacgttctaatgtattttggatggtttttcttttctgaattctcatcaagtcatacttataaaaatctttctaaatgcttattccgtgccagtcttcagagcagatacacatacatcagcacatcccatgacatatattaatataaaccttctcccaggagagatgggtagttttctataaagcaaaaacagcattgataatttcttctaaaatctaatcatctccagagtccttgaggcttattcaagacaaatgatttgccgggcgcggtggctcacgcctgtaatcccagcactttgggaggccgaggcaggtggatcacgaggtcaggggattgagaccatcctggctaacacgatgaaaccccgtctctactaaaaatacaaaaaattagccgggcgtggtggtgggcgcctgtagtcccagctacttgggaggcagaggcaggagaatggcatgaacccgggaggcggagcttgcagtgagcccagatcgcgccactgcactccagcctgggtaacagagcgagactccatctcaaaaaaaaaaaaaaaaaaaaaaaaaaaaagacaaatgattgtaagtccccacacacaaatccaggtgagtcatgaagtctttggccaatgtgtatggcccttctttagagtttaagtaaaatcaaggcagtaaggagaagtagactcagaatatctctacccagtagcaggcctcatgttatctagtgtagttaaaaatagtgtttccaagaatgtggaggaataggcctcagaggggattcttacactttctctgtcattgtgagaatttcccttgtcttctaataaaaaaatatatatatatatttttaaaagcagtatcttctagagataatcacgatatccagccaatgaaactgttgatttacggcacctttaatcttcatgaataagtaaagcaaaatcaaaataaataacagaaggttacacaaagttgtcagcacggggctgtcaaatggtaaatttatctgtttctcaattgccagtaaaatacacactgcaaagctcacccacgttgtatatcatatctgccaactcatttctgtgattaaatattccatcagcgggactataaggcagcaaagcttaacaagattcataagatgcaccacttgaacacacataactcacttccgtggatggagagcaccccgcctgcaaagggaaattggaattgagttaaattactccatgagacgtgatcaatagggaaaggcaaagatcttctaacggaaatgcagatctaagatatagttaggtcccagagatgagatacatacaattaaagtaaaaataaggagatgcagagtagatcaacttgaaaaccttgaagaaaacaaaaaccacccctagggatatttattattagtggaatttggggggaataaagagattctgaatggatactcctgaaaagaacaatttgtggttttgagagggaaaagaaaatgacaggaactaaaaatgcgccatgcctgactgcaaagtcacatttgaaaggtggtcaggtcttgaaacaagctcaccctagggttacaggggcgatcagataatatgagcatcagagaacatcacagactgtaaaatagaaatagaagagattcatgtgatcaccaaagtcacctcgactgattatatccatttcagaaagaacctggccacggatcacatgacttgatgctgggctaggtgatgggaaagtggatttggatctcagtatgaagtttaaaaatgaagagggtggttataacactctttgattgcttatctcaaaagggcaactgtatttgacctcggatttacccataccaaaggtattggttttctgtgggctagagtgaaccatgattcatctcagaattgggtcaaaagaaggtctatgaaggctccctcacattttttcctcccacttccaccaccaagagtctattaccgttaagagaatgacttttagtcatacttttagctgtacctcttttcaattcccttcctacaatttggatacaatagcatctgagaaaagttaagattgtctagaacccacctttgatcactgtggtccctgacacaagtttgctctattttattcagattggcattgggctcagggtgatttggctataaaaagtcctaggtataaagcatgccctgtttgggatgaaagagcacagtgtgggtttacaaggtaactgttaccatccaagcccttcaaagcagcaaatattcaggtgcccctcttggctccaacactttctcatacccaccaggaggactagactcgaatcaatggccatagggagcagttcctcatgaaccattgacctttggctctgggatgttttgcatagtttacgcatctgccaaattcaaatgcagtgcacttcagtgaactggaacaggagagtccagatttaagtccccgagcaaaggattttcagcctggaaatgttccacttcaaagagtttatcttgcacatctgtttacctttgcctccccttttagttgtaattcacttcgcttctctcctctcctcccctcttctgtcttatcagattttattccagccctgcccatatttggccttaatttttatctgcgtccttctagatcccacagagggaatgcaactcatctttgatgaagcctgtggggttttttgatcttcagataagatcagtacttgcttatgtgctaaaaactgcatttttgaagtaaattggttctttttcttgtgtgtgggaagtctgtcaagaactgctccccccaaaagcagggggtgtcaaggtagtccttgtacaagaagcttcacatccaggctatgggaagcgaatgaggtttggatatccgactctggaaaaatttcacaggggaagttttaagttaccattgtccacatagtgagaaactcaaaccatcaacaacagcaagccacttgcaggtacttgctctgtgctgaacaccttgtttctcctcaaatccttatgaaaatgctatcccattattttcatgatcaaattatgaagtcaaggtttctgggaaagcttacctcattcgccaaatcacagaactaccatgtgaaaaattctggttattatataaaggtcttttttcctaagtttcaaccccatgttttttcactgctttgctacgcagcatcctcaggaggtgtagatgagggcatgtcctcagtgtcttctattcatgaggtcacagaatataataatgaatgaaggccgggtgcggtggctcacgcctgtaatcccagcactttgggaggccaaggcgggtggatcacgaggtcaggagattgagaccatcctggctaatacggtgaaaccccatctctactaaaaatacaaaaaagtatctgggcgtggtggcgggcacctgtagtcccagctactggggaggctgaggcaggagaatggcgtgaacctgggaggcggagcttgcagtgagctgagatcgtgccactgcactccagcctgggcaatagagcaagactccatctcaaaataataataataataataataatgaatgaaaacacatttgcatttaatattgtctgccacatgccagagttcatgttgagaactttacatatatgtacgtaaattagaagttttcaggagaagtattgttaccttcgatttgcaggtaaattagatccagtgaagttatgatgccagtgggtgctgactctgaaagttaaggagtagggccaaagctgttatctttgtgactccaaagctcattttctacctacaagctgcctcccaccaatgctttagttaacccaagtcctagattagtgattcttaatatggagtgacctttctcttaggggaatttggcaatttctggaaacatttgtttcattgttacatcttgggtggtggtgggggcggggattggggagtgttgttcactgctgacatctagtgggtggaggccaaggacgcttcaaaacaccctgcaatgcacaagacattccttgaccacaaatcgttatctggcccaaaatgtcaatagtgctgggtttgagaaattctgtcctcattgacgctattcgagatgccacatattcacggaataccttaacaactctcatgccccactggttgctaccactaataatgtatgaacagctgcagtcatcaatggcagtcaaagaatttgaagactttcatgtaaatgtttcatctttggagcattgtattgtgattatttactccagaagggaaaagcataaactttgatttgataccacacagctgtgttgggagtccccaagaccactctcaggctccatgattgattagaaggactcagagttcaaaaaggctgttacactcacagttagtttattataacaaaaggatacagatgaaaaattagcaaagaggaaaagtacatgcagtgaagtttagaagaaacctagcaaaagcttccaggtgtcctctcaccgtgcagtcacacagatgtgcttaatttttccagaaatggcatgtgacagcacaggcatagtgttatcagtgaagctcacctgagccttagtgtccagcgtttttgttagtggttactcacataggcaagctgcacctgcatgactgaccaactctcaaacctcagcccatgctatggaggtgtgaggaacaggaattcaccataaatagttaccataaacaattggatcaaacctatatggtgtggtccaaggcctcaggcatacaaaaacaattttgtttttgtttttgggatggagtctctcactctgtcacctaggctggagtgcaggggcgttatcttgtttcactgcaacctctgcctcccaggtagctgggattactggtgcccgccaccacacccagctaacttttgtatttttagtagagatgggctttcatcacgttagccaggctggtcttgaactcctgacctcaagcaaccctcccacctcggtattccaaagtgctgggattacaagtatgagccaccatggctggcgcaaaaatagttttatcaggcagataatattctaaggcctgatattttatctcccaggagctggccaaagtccaatcctaaggacaagctgttgtggaaaatgtgcaaggtttgagatagcccaggcctgctagaatccacccttccctgcacaaccattaaaaaaaaaaaaaagtaaacttgcaatttatagtgacatctgtaatgatggtagtagtgaggatgatgatggcataagaaacatgataccactgggtagcttgactgtaagaaaaccaagccaaatttagttatgaaagagaaaagaatgtacagcttgttagcttaaagcaggggtcttcaaacaacttatcactgtaggcacagatagtgtttttgactttgtaatccctatgatccctgtttcaactactgagttctgccattgccgtgtaaaagtagccatagacaatgtgtaaataaatgggcatgattgttttccagtaaaactaaggacgtggaaatttagattttatacaattttcatgtgtcacaaaatagttgttttttttcaaacatccaaaaacgtgaaagccattcttagtttatggcccgtacaaaaacattgtccctactttgctgagcttggcttgaagagctcagcggtaataaagccaccagtttaagcccttgagagtttttcttttggttttttaaattgcacagctttagcggttatatactacatgaacccatgaccttagctggatggcactcagttgtttgatgttcatcagggaagggccaaagagacagaccgtgtattaacacttaatccttgtttccatgaattcaccttttattgcagaattatagtatcgggcgctagacactgtgctaggtgccgaggtaccaaaacagacccaggctttccctctagaagtcaacagggtagtagaaggatgcaaaacaaactgtcaatgcgggtatagtacacagtgatacctgctagagccaaaagaataacaaggctctctgcatgaggagtcaagggggtggtgtaaattgagtcttaaagggtaagagttcacctggtaagaaagtgggtaaagatcattgcaggagggaatatggaggtggttggtagggtcccaagctgtttctcaacctttatctttagaatccattgagaaaacttaaaaaaaaaatacacatgcttgatcttcacctgatacctactgatgggaatttctgagccaagttgacgttttttccaaaggctaaggtatattgatctgttgagattagagagtaccttctagagaaaggttgcataagaccttaaaattttacataatgaaatctgaattttggaatttatcctttcagtggtaggcagccattgaaagctctattaaaaataacaattataattaaaaataaataaggaagacacctgttggtgagttagtacttgtatctatattcacactgagtaacagtcttataattaagacttgtattattactaatatgtgcgtgaagccctgtggtgctgggagacttaggagcagattatcaactgttcagcaaccctgcagattgggttcttaattactaatctagtgcctaggacaaaggctattgtgaaacttatttcgtggttttctctaaatcttttaagaaagtaaattaccagcgatttcaaacgcaaggtgacatgtttttttttaatgttttaacttgttatcattagattataaactctttagtttgaaagactttttgcttcccactttcattgttcttttcaaaatttattgttcttatttccccaacaaattaagttggtgtataaatagaaataaattcacccaatagtgtttaataccctttctgttaattacatgtagatactcattctctacatataaaacagagctgtcctgttgtcttttgaaaatgtagttttgaagaaccaactgacaaatggcaaaaccctactttgagtaacttcatcagtgacagttaatgcatttctagaacttccatggaattgttataacacattacagtcgacatattggtttatgaaaaattaataaagccagtggaaaatggaattccgcatctgcattagctatttacaccaaaagaatcagccagaattaattatgccgtatgctacgttctaatgagtttttcattaaactgtataccattatggaaactaaacaaggattattcaaagaataatgccaacggctgttattttgttgagagattaaattagttaatgggttatacatttaaatctgatgcaaaggttaatcgatgcacacttattgtattaaacccagtatcattttaaaacacaaacaccccaatatcactgatatttcctctggagaaaaaaaaaactatttgtatgattctagtgtttggttgatgtgcatgtgatattgtaaagattgaaatccaccctattctctttcatttttgaaaatgattttcactagctgaaatattatgtttgtttttagccatagcaggggaaggggcagtgtgtgcgagtatgtgtgtgtatgttgtggcaggcatagacaacttcatccaatcactctttgagagattgaaaggtgacgtgtattttctactctcaccaaaaaagtcaggttaaaattttaagcctaatctgagaaggcttagaaggcaattcaagatgaaggatctcatcctcattccacaaatagagtccctcctaaatagttctgtaatagtacttgaaatatgaaagaagtgacaatagagaagcctgtctagacagctttttaggctcttacagcatcttagaggctcttattcccaagaagataagaagagagtatagaaggccttctaggttctttgcacagacttgtaaattccactgttttcagttgaatgacagtttctaattttttttttcctaatcagagattgcaaactaaaatgtttttaggaacaagctatgacataaataagtgaaatgtgccaaattggaggagctgtgtctcaattatagcaagtagtggcttctcacctttgcctacagtggctctgccggacaggaatcctagcccagacacctatggtctgtcccctgacttcccactagaagctagacatatcttatcacattaaaactcctaagtttaagtgcttgcaattcatttaatactaaaatatttgccattaactattatgtttagcattatgtttagtggccaaacacaatagttcaatagctataaatttgctatttcctttctgaaaaccaaagtaagtcctcagagcatcattgttttagatacccaataataattgctatttccatgattatgattgattcacttactgattactatttgccaaacactttcatgccatagttgtaatcctcacagcaatattcgatcaagtacacatttttatctctatttgacagatgtaaccactgaggctcagagaagtacagagttttacccaaagtcaactcaacttccagtcagcaagatcaggaaacaaaacaaagttaaaagtttcaaagcctacactttttcagtgacactatagaaatctcagacgttcattatttctcctctgcatttgcctcctctatgtcttatttcaatcttgcaagtaggatttttcttatctgtagaagatacattctgcccaaaggcttccttggttggatttaaaaccctatcacagattcttaaacatgatcaggaggttctagctaacatctttagccaggaagagtcaggtgtttcctgccagatggcagcttcggaattcttagatgtggctttgttgtaatgggggtaatggatattgatcattctcatgctgaaggatatgtttttatcaactcaggaccaagtatcaccattgataaacaggtgtagctttgagagagagtgtctgagctttggagtcacacaaaactgacttatagttcagttttattatactttttctctgagctttcatttcctcttgggtttgataagaaaaagacgtgcatgtggagtacatcttgtatagcacctgaaacctagggccaccttaatgggcactgtcaatattagctgtacatgaggttcctatgtaatccctagcaatttactgttgtcagcaccatctgcatcccctggaagcctatgagaaatgcagagtctcaggccccaccccagaccccctagataagaatctgcatttagaagagtcccaggggattcagagcatagtagagtttgagaagcaaggccctagtagtcttatcatctatatattgacacctataactttgaaggacaaacatcttgcaagatagaacttattttcattgtttttgttgtggctgaattgatagacctccacaaatactctatggaataactttttgaatttttttttttcttttttgagatggagtctccatcacccaggctggagtgcagtggtgcaagctcagttcattgcaacctctgcctcgcgggttcaagcaattcttgtgcctcagccgcccaagtagctggggttacaggcatatgccaccacgcctggctaattattgtatttttttgttagagacgggttttgccatgttctccaggctggtcttgaactcctggcctcaagtgatcctcctgccttggctttccaaagtgctgggattacaggcagggtcaccacacctggcctaattgttttattgttttgaaaaacaatccaaaagaaattttgagcaaatatttttaaaagcctgtgtttgaaaaaagtttgttttgaacaaaaatgaaataaaattaattttttggcaagtattgatcaaatgatagcctctgaaatacttagtgccagctcccttgggaagggctaatggtgtactgagagacagttactgttagtatttttgcaagcagtaaagggatcttagaacactgatcagcaaactttgtctgtaaagggccagacagtaaacactttagcctctgcaggccataaggtctctgtgcaattactcagccctgtcattttagcagaaaagcagccatacacaaaaatgaatagatgtagctgtcttccaatgaaactttacttattagatactgaaacttgagtttcatgcaattttcactagtcaaatgttactgtgatttttgtcaaccatttaaaatcgtaaaaagcattcctagctcacagaccatacaaaaataggtgggggctcgggggaggggagcagttggatttggccaaaagtctgtagttggtcagcacttgatttagaagatgattgttagaaccatgggtccaggaatctggttggtatgacttgcagtttcagcatcacgagatctgtgtcacctcaggcaaggaaaaagagttctctatgcttcaatatcctcatctattaaatgggtataaaaatagtgtctgtcctacagggtcattaagagtaaatgatgatctaagttaaagttgagcaggatacccagtgattctcaggtattcagtaaaacactttgggaactcttattgttaggtttatcatattaagttaaatatttcctgtcaatgccactattagcctacattttggctgcaggagattaagtgaacagttggagtgagtcattaaaattttcaaacaataaatagtcaaggaacaaattcttctttgtattattcttgtgacttttccaaaaagtctcaagttatgtcaaaataaaaagcaaaaagaaaacaaacaagaagtggtgtattttttttttgaatattatgaaaaccaaagcttatgaaaataaattggagtgagggattatttacactatagacagatgcgcttcagggcccctttaaatatggaaatcccttggtacaattaaaacatgatttgatttataagaagtaaacatacagagcaacattttttctgcaacatctgtgcccaaatggaaatatccctatacttaaaactctaccataacccttcagagaagctcatctttcaggctggtgtaaaagcattagggattaactgtgaaaatattcttacatggattagctcaatgctagtcttgcgttcaaaaatgcatgactgtaaaagtatccaccgtccattcgggctttgggtaaattttggaaaaatctgtcaattgaaagcagtcacctccattgctaggtaccttatggcaacctctttggcttctaagtccaagagaagtttgaggcttatgggtcactttgtaggggactctcattataaggtaggaaggtgtagtagttggctagtgctgccatagcaaagtatcacagactggatggcttaacaagcagttcccaaccattttggcacccgggttgggttttgtggaaggcagtttttccacgggtcgggtagcagggatggtttcaggatgattccagtgcatttcttgtgtaccttatttctattattattacattgtaatatataatgaattaattatacaacttgccataatgtagaatcagtgggagccctgggcttcttttcttgtaactagacagtcctgtctgggagcgatgggaggcagtgacggatcaggcattagattctcataaggaacacacaaccaagatccctagctcagttcacaataagattcacacttttatgaaaatccaatgcttccacttatctgacaggaggtggagctcaggtggtaacatgaagtaacatgaacaatgaggagcggctgtcaatacacatgaagctttgctcgctcacctgcagctcacctcctgctgtgtggcccagtagggtccgtggcccaggggttggggaaccctggcttaaacaacagaaatttattttctcataattctggatgctggaagtctgagatcatggtgttggcagggttggtttcttctgaggcctctctccttggcttgcagatgaccatcttttctctgtcttcacctgggtttccctgtgtgtcctcatctcctcttcttgtaagatctgtcagattaaggcccacccatatgacctcattttaacttaattacagctttaaagatctctctgcaagtaaagtcacattctgaagtactcagagttatagcatttaaaaatgattctacaacagtggactgaaggaaggactcgatgaaatgagtgacagtgtaggaacccaaatagcttgtttttcatctaaaatttacctctggttggtaaggtttttggtaaaggacttagttgttctgtgccacctttgtaatgccagtaaaggaggactaatggcatcagacgcctactatggagggacaaatgcaaagtaaatattctttggcaaatattgaaaaaagctttttctttatgtagaatcaaaacatttctagcattgattcctattactactaaactttcagttatgatagaattatatagcagaaatagagaattttggccaaagccataatagttatatctaataaaaattgttctcgaataattatacttatcttagtgagcagtgtgactaattatgtaggctaaggtttggtttgatattcagaatcattcttttgttccttttcatgtatacatttgttactgaacctatgagcactaaacgtgataacatgtcatcctctggaaaagcacatggagttcaacagatgtaccccaaagcccagcacagtgcctggcacatagacgagtagatgccaataagtaccagccaaatgaatgataatactcactacatcatagttgcctagctgagcactagaggcagagggactaataagcacttgtgctactcagacattgccctgcagggttctagggttctcctcttagccttcttccctgagtaagctcctttcctcggctgagtgacattaggaaagccagacatcagtggagagttctatttttgtgtgactctgcaccaccacacagtagaggtttgttgaggtgatacggttctgatgactggagaaatgccaaggttgttggttttgcgccgattggattaacaatgtgaacacacgtggagtggttttaaggagcgaaaagtgtaataggcaagaaaggaggaagaaagaaaagaacagcttccccatacagagaccggagagtggggcctggaacagagaaaccttgtgtgtggcagataagtggtagattataggggaggcttgaggaggcggtgtctgatttgcatacagcccaggggattgctttggccaggtgtgtcatttatgcagcctgcaaaaaacctggctctcccaccttagtcctttaatgtgtaaatgcgggtcgccatgatgttctgaacacatggtgttatctggaggtggccattaaactgggcacaggtggtgacaaggagaagacagcaggaatcgccacattgagtgaaccctgttcctaatggcgggtatttgcatatcaaagcttgcccacccagcccttcgagcagtcttttctgttataaaagagatggtttgggggtggtttcttattacaggaaaatttccacctagaacctttacccttactatctgcctaaaataatttcttaataactcctgtattagaggtacagacagtgcatgacatatacagaaacttcctgcatgggggccccagaatactcattccatcttaggtatttcataaagtctagctgttgttctttgtgtcttcaagagcatcctccagatttcctaacccattttaatcttcgagctcttgaagctaattggccactcccagttgccaggcagttgagatgttccgttcacattttttgtttaaattcagaaattatgtaggaaaagttctagttattcaccatgtactgacttggaactgtgcccatttgatactaaaagggaacgggcagacattgccaaacagcctttcttttcttccttcccatcctccattttaattttatttcttggaagtgtagcatggctgcctatcagaaacctttggattctcacttcatttgctccctgcctcttagtctaggttcctggactcatgaggataggaagataaacacatgattcctgatctctttgaattagtagcatcaatgggggaagacactcattaaatagattacacaacacaattttaaaaagaagagaaaggaagctgaactctgccagacaaaggtacatagatagggtttctaggagaagccagagctgagtccagaaaggagttacctagagcaaggaaaagatttcctggaaaaagacaaagcctctgcaaaggcatggaggtgtgaaactgcactgctgttccggtttgagtccagttttcctcacttagggggttggcagcagagtaaacagttttcgacacttcctccttcctgtctgtgatgggaaacatcccttctaggcttgtgcctgccccttcaggggccaggaatgatcccctgcatgccgtatggagactactgctcagcagaaagggttccgatgccccatctgagaccttggcactggcttactcccttcctcactggaggattcaaaatcctgctggagagtggctgtgggacatcttgccaggttgtggggatgccgatgatcccggcactcagagtgggcgaacgtgacaggctttggaacgggctctgattattctgagattgaggtctgtcccatggagccaaatgtctgccaggtgctgatacagtcatcgacagtccaggctgcgcaggtttcttgttagagtgggtgagccaactttataagaaccaggaaagaagagaaaacacgtgaagtagattgaagctatttcaatctgtaaaagttatttacatgtagtgtgtaaatctatttgaacttcaggcatgcaaatttcctgccatgaacaggcggaagaaagattggttgaaaaaaaacactatttttagcaaagagggtagaagtggagacttgtttttaaaaatgtattataattcaatcatatgcattaatccttctgaggatcaggtattttcctaggtgttggggatgaaaagatgagtatgatttggctctaccgcaggtggattttgtagttcagacgaccaatgtctaagtagaaaattgtagtagaggaccacgaaggatctatcagggaggtttaaaaatgcaagataagagcatagtgtaggtaataactaattcacccctgaggacaagggagagaagaggtcacttttaaactatgttggaggaggacaggggaagcccctccgcctcctttttttttttttttcttttaagttgaaccacatgaacttggcaacattcaattctatttgacaaaaaaaaaaaaaaagtcaatttgaaatggtttaatctaactctaagagcaggaacagcatgaaggtttcatccacttcaccaactctaatcaaatgggaatcattgcctactggctgtgttgagaatgattgtgaggattccaggccaataggaaaggataatattgaaattgattaattccgttctggctaaagaatgggtaggtagtggtataaattgaccccatttgccatccctagattataaggaatttgataaaagcacagaagtctgagaagtacaggatgtcatcatgtgatacaaatgaaggttcctggcatttggcagtagaaggtttatgttgaaggctagggacagatagaagatccagctcagtggactcaatgaagagctatgttgaagctatattgagaagtgctttgaatgaccttgtaggccctctccatactgctgcttgtaccttattacctatttgacttactttttaaaacaaacacacttacctttccctgcccaaaaaaatgcatggaggttgcagtgttctctgctgctttggttttgtcgaattcaaagcgtccttttaagaaaaggtcacaaagcactaagggaacatacagtaagtactttccaaattaaattggaggatgcttttagataaaacaaaaaccaagtcctgtgaaggcatagattttgttttacaaaaggtcaaaatcattgcataaagattttttttttttttaactacgaagaaagtatccaaagaaaatatttcagtccaggttctcagaatccacagcattaaaaaaaattaggaatgcttcattatgccgtgccagaggttagctttccaggcaaaaatctgtgctgtgtcccagtggaattctataaattgcatcgaggatattgaaaattgacccaagggttttaaccatacaatactgaaatgtccttctgtgtatgtttgtgttacagttatacatttttcttttgaaatttagcaccccaagaaacttcatagctgattttaagtgtttttttaaaccaggcgtgcacaggagagaaggttgaggagcattccctaaatccacttgctaggatcctatcgtagatgattccgacctgataactctctgtatatcctatagaaacacattcatttatttctaagatttctagcagtgagcagaagcacatagataaccgctgcagagtcacacaggagtactcattgataaacaccactgactgtagaggggactaactgtctttcctggtaggtagcttgcctccccttgcttggtttcatatcccaatctccattctttggagtttggtttgtttgctgttaatccccagtgacctgctaaaactggaaatacctgaggcgaggttaaaccatggaaagtatcatctcatacgttgtgataaacttttttttttgagatggagttttgctcttgtcacccaggctggagtgtaatggcgtgatctcggcttactgcaacctccacctcctgggttcaagtgattctcctgcctcagtctcctgagtagctggaattacaggcgcctgccaccacacccagctaatttttgtgtttttagtagagacaggatttcaccatgttggccaggctggtctcgaactcctaacctcaggtgatctacctgccttggcctcccaaagtactggaatgacaggcatgagccactacacctggccgataaactgtttttaaatgaagaagaaagaactattagtttagcacaggtgaatcatactgacactccgccagactcttgatatatttactacccagagaaggttagttaatttcgagttaatttcactgttgtgtgaagggctattttgcgggtgggggtggctgttctccagctataagcatgggaaaccagatcgaaaaagaccatgggacattccttcaggtagaacctctggccctgggctgcttctccctgggaaaaagtggatggagttgtcagaccggtaacaggggaagagtgagatgggttagaaagaattgtgtctggtttactgtcccttgatgacatcaccgtgcagtccctctgtgtggcaggaccccacacgctttggaagttttaactacatttttgttgatcatagggaagatacagaaggagcatagaaccattccctagggcaagtctccaaggatatagaaaagttccctgttctgcgggtgcacttgtaaggttggcttcttatcatgggagattgctttcccgttgcggtcctgacaggggaatccaaatcaaactggggcggttgaccttccccagtcaaggaagtgaccagaaaccacagggaggtatttccatcaccagtaatggccttaaaactcctcagaattctaattattttcaaagtcttggagtttgagctttgcagcagtgggaaagtagcactgataccctgacaattcctgaccccagtcatccctggagtgggtggttgttcaaaatctgtcatagattgaggaggtatctcaggattccaccattatttgccgctgtaaaattccaccttgcaaggatgaacccagtgcccttcgctttaaatcaggaggaggcaagtcattgctgcaatgcagccgcagtttgcaggatgagctaggcagcctttctggctggaaggcagagagctttagggaagaaagcgggaatacagaagccgaagattctctcatccagtgtccagtgtgggtccagggtgggtcccagggatggcaaaaagttgcaatttttctttctccgccttacttctgttcttcctctgaagaactgattcggaaagactgacatttgaaggaagttaccgttttctctaaacctatcaacatgtatgcttactattgattgagtgattattacatgccagcccctgccctgggtacgtctccagtcatatgatgcacagccattctcggaggtaggtatatttacccctgttttccagatggaaacactgaggcacagagaggtacagtgacttgccaagatcacacagtgaagaggtgtctgagtcaggcttactatctagctccctccaatatttctcaagttcccttttcagtatgccacgctgcttccattcctgatctgaacctgggccctggggcaaccagagtccgctacacaaccccgtgtgaaaagtcatgacgtgtgcttggtgggccgggttgtggtgggtgggggggcttccattgattccctttggctaaggcagggggctttgttgggtacccttgtcctgcgctctgggatgtggctatgttttcatttctctgcatttctcggttgcattgccgtgatctctcaggtgtagtgtaccgattcccaaaccagataccatctctctctctctttcgtaggcacggtcctgttgtgccaggccaaccaggagggatcttccatgtacagtgcccccagttcacttgtatatacttctgcaagtaagcccactgtcgtggctctttttgttttgtgacataaatctgagtccaatcaccttccctgccatgtaagttctctccccctccctctgccccaccctctcttgtggctctctctgaggtgaagttaattttcataagcatgtctgtctcccatgccacttcccagatgtcctggacattctctgttagatccgtcaggattgggtccaatggttgggaatgtgggcatggggttggtggggaggggcatgggagggtgggaagctttagctcattgcctgccttctatcatagctttgcaaattaatataaaaataatttaaatagcatatacaggccaccccaaaggcacccttgcctagtaaaagatgcttaaccaggattcttgtacacagttgtctcacgatggaaaataccactagcctgcagctagtcacttgtttgcaaggctgttctgtcctttgctatgtaattccaatgaggaggaggaggaggaggaggagcagagagagaaatgtggttcccccctcatttaatcaagtgcaggggcagcaacattaaataactgtcttttaaaaaatcggggcacttttaaacgtagataagtatacccatccagtgcgggagggaagagacccaaaataaatacaggaagtagatcacaacattgacatggaagaaccgaagatttctctgcctcggatggatgctctgggttcaaggatgccctatcctcaccccaattcccagagcaggtagaagaattaaagccgccactgactctaccatgttctcccagagggtataccccttcttaaagaatctcccagccacagctgaaactttaacatctgttttatacaatgtgtgtaaatcctgtggagttgccgtaactgcagaatgagtcgtctttagggtcagtgcttaaaagtgagtctgggtgcctggagtgggggtggggctgtttctcagagtagttgtaaaaggcagggatggggaggagagcaggagtaccaggctcaagggataagagacgtaggagaatcctcaccatcgtgccaaaaccaaacatcttcgtttcctaaattgtgaagctgaggaaaaccaacctcctcactgttggggcagcacctccctgttaccagcagtcacagggaatcaaaaatataatgtgacacacccaagggtctgaagtcttcaggaggtctgacagccagttgtttctcacagttagaggttttgagacaaagtctcactctgttacccaggctggagtgcagtggtgccatctcagctcactgcaacctccgcctcctgggctcaagcaattctcatgactcagcctcccaagtagccgggattataggtatgtaccaccactcccactgatttttgtatttttagcagagatgaggtttccccatcttggccaggctggtctcaaagtcctgacctcagatgatccatccacctcagcctcccaaagtactggaattacaggcgtgagccactgcccctggcccagactataatctttaatggcaattttggcattaattaaatgcaagacatttttctgtgcctcccaagaagcccaaatctaatcatattggcaagaagtggttctttctgaatttgtgacaacaaattcagaagggcctccttggggccagtgtaaatgtgtgtgcatgtatctcctgaaattgtaatgttactacacattttcacatgtccagccttgtgtattcctctcaaaaccagcaccaggtaggtatcacaatgtttgctttacaactgaggaaatggagggcaatcccagagccagtgtgtaatagatttgtcttctgaacctgggaacattattcaaccttcagctacctttctgagtccatttgactaaatctgatcgctgtaccatttacctagccttcctcgtctatattattttctgaaagagagttggtgtgccaaaacttaccatagggctgggtcctagagtattatttttttctctaacattgcggtcctatagaagtgtctgggataaaatctttatgctatccagcatagtgctgatggaactgagacactcatttttatgttatattaattagccatataggggctaatggttaccatattggacagtatggctctatatgatgatatgacatatctatatttcaattttctttacagaagtgaacaaaacaatcaactccaaaagtgtgctagtttgaattggtatagctattctaaagtgaattggggaagcatctctcacatcacatgaaaatatttcccaaattctccataataaaatagctgaagcatagagagaaaatgaaaccatctaaagcgagggccacccaagccagcccatggcctgtgttacaaggcttatgaatgaagaatgatgtttagattttccaaggattgaaaaaaacaaaacaaaaacaaagaatgtgccagagaccaaggtggcctgcaaagcctaacgttttaacagtccggctctttacagaagaagtgtactgatctccaatttaaagggtcgattttagtattaaaaatacaaagtggcaatatcactgcactgtgtgtagctgtacctttttctatgtttaaagtaaaaattaacaattatgaaattgtataatgtgcatccaacatccttcatttctaaattgtatcagtcgtattacctgcacattatatgccatgtgctttttataaaaatatgttaatgaacccatagtattgtttcattatattatattttaatctattcccccattcttgagaacttaggttcatagcaattttttttcaaaaatattaaacaaaataaacacccttcaatagagcagttttaaagaaaatagctaattttaccaccccattaaaaagcaaaatgaaaactagtttcttacattaagaatcttcacttgtcgaggcttaagcaagggcattcagatggtcaatctcgattagtattttgtaatggtgaccaactctgagacccctccctctccaattgggtaggcagaggggccttcagttatttctgtttgcaggctgtgcattggtgttgaatgttaagtttatccgcaaatccctaagacacattgctgcggtttcctttctcttttatggctttttggtctaggctgtttgtggattgctggcttggcaacattcacttaggtttttctcttccagattaggtgcatattctactacaaaaccattccccatttcctgcaacaggtcagctggcacataaagggttatttttacatgcaggcctgtgcgcacacacacacacgagttatattcatggtcatccaggatttttcttctcccaacagtttcgatttgcacagggctgagagtcacatattttatctttgctctctgatgggtgcagactttttctctaggaatccaaccattgccctcaaagctgaggctaccatacttttcagcaattgtgtaggatgctcttgttttttaacttgaaaatgcatatgttcctcatttctgtttaacagctgtgctcctgaaggaaggtgtgtgtaaattacacttttgtatgttggatcctatgtgtctacagacttgcaagataactctggagcttcgtttttgtttttttgcgtttttttcctccatggatctttaactggcctttgatgtttgtttttttttttcgagacttaaattgtacctcttcctagtcaaatagctaatcatctgtaaataacatccttaaatgcagtaggggagatggtttttaaaggaaccctgctgaattagtctgtaatgaaaataattcctactgaagttatctgcttttgatatgcatttttgcataacagtgaggttttctcccccattaagtgaatcatcctaacaatgtgacccaggactcataaaagtattaagagaaagattttcactgataactttgtgtccatacaactaattccgtagactcttccatcggaccccaaatgactccagtttttctccgtcacccctgaacttcatgcaggtttaaaaccctagttcaaattgtgtcacaggtcatcatgcatcctcttacacgtcctaataaactactctcatccagagtgtaaaatgggcctgctttctatgaaacttaaatgaagaaagaacaaaactctagagaattaggcaacatcacctagtgtcaaatggaaaacatttgcaattaatatttttcaataggctttcaatagaaacaattcaaccccttaacagaaaggtttagtgaaatgggcagggctgcttggtatgtggactgttcattccattccgaaggccagtggtcagcctgctcctcttgttgaggggaaaggtactaggtgtattattgccagcgctgttttgcatatggcgaatgctcaacatcaaaattggcaccaggcagaaataggaaggtaaagaacataccacatctcttccaaattaatacatgagtttcattttcattagttgaagtatctaaaggtaaatcattggttccatgaatgaaaaagttcacttctgattcagattagcaaagccagctaccgcagatccttatttacatatgaagtagatgtttccagaagcacgtaaatgtttattttgttttcttcaggattttatgaatatgttttaaattacaatagtaacaggtgctcattgcaatcaatgtgaagtgtgcaaataaacatacacaccattgtaataatgtgggaataatatccccactttatccagtaacataaacccttaaaagtgtgtggacgcccagtatctttctacattttctccgtggttattcaggaaaggacatacacacatgcaatggtgggggcgggggacggtgtgttattagtttgactttacagaggagagtatacacagatgttacatggacattacatatatcaatcatatttagtttcacataatacattgtgaccgtctccctttaagccttttagatattttcatccagtttgtttaatgacataaatggttgacagtcaattcaaccattctctatccatagtcattcaagccacttctttttactttttattttatttatttatttttttattttttgagatggagtcttgctctgtcacccaggctgcagtgcagtagcgcagtcccggctcactgcaaactccacctcctgggttcacaccattctcctgtctcagcctcccaagtagctgggactacaggcgcccgccaccatgcccggctaatttctttgtatttttagtagagacggagtttcacgtgttagccaggatgatctcaatctcctgacctcgtgatccacccgccttggccgcccacagtggtgggattgcaggcatgagccactgcgcccagcccaagctacctctttttctattccctccacaaggagatagtaaaaatatttgcaaatacccttacgtgcaactacatccattctacacttaacattgccaaacatggaactgttggttcccttccagcatgcttgccagcactgccatgttttgctctattttgcaaattgcatagtgaaaaataacatctcaatttgttttagtttgtctctgcctttctcctattaatgatcaccgtctttcacatttttcatttagactttacctctttgaatttccagtatacatcttcctgtttgagatttttcttattttattatcagttcacacgtgagtgacacttgtttactaggataacctatgaatggttcagatgttacacgtgtatttcctgttttgacgattgatgttgctcagattccaccatacatttttaattacataggcaaatgtatctgtcttttctgatcattttagacgtcattttggattacaaaatccctgtcaagagcaagttttgttttgcactgtatcagtcagtttgggctgctataacaaaataccgtagactgggaggcttaagccacagacattcattttctcaaagttctggaggctggaagtccaagatcagggtgccaagaaagttaggttccggtgagggctttcttcttggcttacagatggccaccttctcccatgttttcacaagagagagacagagacagagagaaacagagagagagagaggaatagagcaatctctggtgtctcttcatataagggcatgaatcttatgaagggcccaccctcaggacctcatctaaacctaattacctctcaaaaggccccatttccacaaagcatcacattgggggttacggcttccacatatgaatttgagtggagaggacataatttagtccgtagcaagccccttgatacagggatgtcagttttatttgtcaagggctagaaaagcattttctggaagaaatttctttattgttccgtatgcttatcaatgccaatgagcgcgttttccacagttccatgaaagccagagttgaacagtagatccccatcaggataaatcctaaagttaatagaagattaattatcgtttcccctgaaattttcaccctgatacccttccctcctcaaaaaaaaaaaaagaaggaaaaaaaagatatcatgggcaaatgcttgggaacctgaatgttatcaaaatgcaaaatcaattcctcatttattgacttctatgaaactcaagggcaggtggtaggggcatagtttcaactgatatattgattgcagattttaaggaagtaattgtgtggaattcataaaacgatgatttaagtggcagaaacatacataaatcaggcctgtactattttacttttaggtaattgatagaacttccatgggtttctgtaattaaagtaaggacctaaattaatttacggcttcctttttcttctgcacaatacagaaaatgtcagtgggctggactcagttactagaaaggacacatacaggtcattttgttactgacacattggtgtaaagaattgtgtcttctttttccctcacttgccagtgtctgacagcttcttgctttcctcctagatatttttctactattttatggagggggtgcttaacaataactagctccgggactagggtaagcaagtgacgtgctcacttcaaagattaaaggggtatccaaatacctcataaatagcattttaatgcaatatttttaaaaatctaaagtaacagaaaaagatccatgattaacagaatatcaagacagaataagttttattcctttttccttttggagccttaagatcccatatggcttaatccagcactatttcaattttgatagtctgctcatcgtggatttaaaaaataatttgggtgttaaaagattgcattaaaacatgatctatctccattacagagttttttggtgtttcctcccttccaccccccacttaagttctgcaacgacagtgaacgcctgttaacctagttgcagccctgaaatcatgatgatatccataatcataagtagtggttattgggcactcactatatgtcaggcattgtgctaagcccttctcattagctttcttaagaaggaactataggacaggtatgattaattatgctaccttttctcaggaggaaatttaggcttgggggcgttaagaagcttgtccgagatcacccagctagatcagctttgaaccaagcctgtttaaatcccaagccgccttcttcactactctctcaacttaccccagaggctggaaacaggatggactccaagaaatggctgagcagggagtggtcacggggaacctctcagcagctgtccagcaactctatttgggccaaggctgtgctgtctcctccccatcccatcatgtttggagaggcagttttcccctctttgagatgtctggccagggcttagcaaaattattctgtaaaaggctggatgttattaatattttcagctttacaggccatctagcctctgttgcagcgactcaactcttgttatagcttgaaagtagccatagactactgtacatatagccatagacttctaggttgaaacatgaatgaataggcgtgactgtgttccaataaaactttatttacaaaaatggtctgtaggccagattgggcccaagcgccatagtttacccatctctttgtcaggccgtaattcttacttaaaaggacagaacatggtggctggctgcttgggggtggaaataaggaaaattcttttaagtgtgcaccctcatgtattttttgcattttgtaccattttatcacattttaaatgacgtgaagtagtacataaagataggtacccttctcctggtacctattaagatcaagatacaaattgatcttgatttaaatgatacaaaatgatcttgacttaaatttgatcaagatacaggaattgggtggttagttttgcttgcacaatgatcaaatctggtttcagaggcttaattctactgacattagtctaagacctgccccagtttccttgggcaaaatgtgaagactccattgtcttacccaggatcttctgtctgaactgtttccatttctatccccacactttcaacaatgctggctctaaaagatcctctgggctggacccttcccatcagggaatcagacactccttcttctcttttgctatggttcagcattacggtggcagcctacctgtgtcctctttgtcattttctcagagataattccttctagtttttagtcctttgatcggagagggggttgaaaggtgttacttcattcaaccaatctttattgaagttttttctatatgccaggtgcaattctacatcctgaaaatatgctgtgaagatactctcaagttggcttctattatacctatattcttggggggacacataacagacaaatatatataatgctaaggtttcagaatttcaaacgcagtgctcctaggggatatttgggaagtaacacccaacaggagacttattcactgttagcactgccattggggtgcctctcagtaggtgaattaagtgtccctattttcaccattcttcaacactgtagacaggtgccctttgctactgagaccctatttgcttcaccaaacccatggattgaggtgttttcagacacctactaggtgccatgctctccctgccacctcaatcatagcacttatctatttatgaacaatagttgcccacagcattgcagaattatccagctaccccccacccaccaatggtgaactccagagattattctttctccatcactgaagcaccatctctgcttttctccatctgctcaacttttcccatgtcccagcacatttgattaacagatgatttctaagaggcttttactagctctgatattaacttagttattccacctggatcacagtcctcagaataggttcatttgtatttttaatccctgcaaccactacccccaacttcttcatccgtgtgttgtttctttggctgtcataatcataacccactttgttgtttgtcctttttaaccaattccaagaaagaattaaaaccactagtagaacctctcacccccagttgtttaaagggaaagttctgcaaagaggcagccacatttcaggcagctgccatgcagctctctgtcattgctttcgttattaatctcaatgcagaatggtgattttcattttttcagatgggtgtctggctgcaaaaggccgccagttgcaaaaactaccatcccatggtgtgcccccaaacatcttatttgtcttgatatttctttcacagaaatacatatgacagataaggagtcactagaggatgcttttgctttgtgtcagacagatattaaaacaataaactatgttgccctgggattccaatgcatacacagccagagaacaaggccgagatgagatgtttcagaaaggcagtgaggcaattattctgggggaattccctggaaaccccaagtcctgtgatagcattgacagaaagtgttttttaatgctcacattttcttaagaggatcaactggctagtgcagctcctgcatttaactccttgacaaaactcaccctcatccggcctcatcagagtcaagagaaatccttcaatagtttgagaggcttattttgagagtttattttttaagcacttatctgccctttatttgcttccccaaactaatgtggatttacattaaaaaaaaaaaaaggaatccattttacattcagagctctgagcaggtaagttgcaggggccaacggcaagatcttgcttggttcttggaatgtaaaagaggacagtttgatgcaatggagcaggtgcacattcccaagggccccagctttataagttgagtcaagctctctctgggtctacagagctgggaaggaacagcttaggaagggagaggctgaatccaagggcactcataattcaagagctggagcaatcattctttcatcaaataccagtcttcttggatagaaatgtgtccaaccatagaggtggctgctgcttcttcccttgccttatttcttttctaaaataaatctcagtgcaaagaccatgaggagcagctcaggttgcctctcatccaagggaaaaagagcctggtgtagttcatataaacccagtaatgtaaacacgtgcttcaaacaccattttcttaaatcatgtttttatataaaagaactgtcatgccaaaagctatttatccctaatggagaacttcggagcactgttaagaaaatgcagtttcagaaccaaacaccacaccacatgttttagatttatctccttgagttttgtttgtatgcaacataggctcttgatgcctaatacttttcatatgaaagcaaacagaaaggcacaaccatctatgggtatttattatccctacccttactatttgctacaggagtctcaaacatttccagaagatcatttttcctttctctggcaagtcctaattcccactagtggttttacagcatttttcttgagctacagcgtgacttagtgaaaagagctggattcaggaaagtctgggagtaaactgtcacggtagactagtgctgtgaccttggccaagtctcctcgccatgtaaatagccatgactacctacctacccatgagcactaaatgagattgttgtgcagcgtcctccaggctgcttgaggcgttacagctcctcaaatgctactctttctttttctggctcagaagccaccttctccaggattttttaaagtccaccaaaccagatgtgatggtgtacttttatagtcctagctactggaagggctgaggtgggaggatgacttgagcccaggagtttgagattgcagtgatccatgaccacgccactgcactctagcctgggggagaccctgtctcaaaaaataaagttcaccaaagaagcgggtttggatggtttatattagtccagtgactggactggtggaccactcctggatggtagttccttagtctattctatatgggtgttttggaggctctggctcagatatcaggcagatgatccctaggctcagacagtacctgtcctccaggttggctttgggcattgatcaaaggatcaggactcttttttttaagtctgaaagctgatgctcaaaatcagatggcctcagcactgacacacagatcagctatccccacagctatggctgggactgaaatgaacaatgcatgtgcgtcgcgtacccatcttgtgagccaccgtcagacccctctgaaggcttcatgttcaggagctgcgtcagcccaagagaaccttgggaaatccagcccagcataaggaagctaatttatctcacttgccctgtttcctacctggagaggcaattcaccgagcttgctgtttcagccagctgttagatagaacatgaatgatttaacaattgaaacttcagtatgtatatgcactggataaagtaattatataaattatttgggttttttttttccgtggtttcccgggaaacaacaacatggttatcagtacagattttgttaaactaatagatgatgacgaactgctgcatccaaattaaaataaatctcagctcttcagggctttgtcttctccttcaaaggacagaaagcacctttgcaaatgccttttgcagttctgccaagttaaacactccaagactgagactcattctcattttgccgaatgttacaaaaatcctgcccggcgggggaaattgtcgatacctgtgagtaggcaaatcacaaatacctcttctgcatagtaaaaacatatcactacacatttagcagccatgacatttgccacttgtctgttggattaatctagccatttataacctgtgaggaaagatacaacagctaactttgggaggtaagcaggaacagcacgccaattagttaccaccaattctactgccttcgctcagagacacaaggaccttacatgatcaaagaatattcatgtgtgtgaatggtgtgtgtgtcttttgctgttgctttaatttgttaagttaggggaactttctcctttgggaacaccagactcgttgctcagagtaaatcccagtgtgctcattacatgtaattttattttcctagatgactatttttatttccacaaaaagaagacttatttcaaaaacccaagttgtaatgtgatatttgataacatattaaaaaagcaattatatatagaaaaacgtgcaatagcccaaaatgttatgaaggtttcttatgcagatcttccaaggctttgaaataagtttctcattccagtcttccaaattagaaatttctagctgaatttagttgtaaggagctcatcattgtgacagtaatcaggtttgtgttcatctgcagcctttactcacactgtactagtacaaacctgctcactaactctacagaatctgcattcccaatatttttgggttgaacacaacctccccctcacatcgagatgtagaggtaaaccctagtggcaaagggaaacagcctgcctttgaactcttaccaggaacataaatcagtggtgatccctatggccggcatccaattagcagaaaaggaacagggcctttccaggtgtcttgaaatctcagaacttaagtatctaacagaagaaatggcgggcacacacacagaccctctaatgtctcccctatcccccaacaagaagcatattgagatctctgggaggactgtcaacagattcccctgcaaattaacccagtctatgatgaattggggctggctctgtctcagatgtggtatggatatagggagatgatgtagcagcttgtacaggcaataggagggaatccaaactgagagtctctaagaagcagagagagagtagaagtagaaagcttttcccggagcctgactggggttgcctttatgttgcatgatggataaaatcataggctttggtgtcaggctgccttggttcaaaccgctgggtgagtatctgagccactctatacctccatctccaccccaggaaagtgaagatagcaacaatcatggttcatatggttttgtgaggcgttagtgggttaatctccgggtctggcaattagcaagtgctagtaaatcctagctgttatcatcatgcaattgaattttctccacctgataatggagcctcagaggttggaattttgccaactgcaatcacatcgttccttgaattactccagttatcactgcctgggtttttagacaagggaggtccaggatcccttatcactaactccatcaccccagagtttctgtgggaatatgcatccctcacaggccgctccttagcaactctcacccgtttgaggattgccacccattttctttcgtaactgtaggactatggcattccgagttcatcacacaccgtagtcaatacacatatcagtgatcaccttgtgctcggtcatcttctagatgttggagacacagtagggaccaacatagagtcctcaggacatccctatagagagatgtataaggaagttgaaatcaactcaggtgataagaaactaatgggaaggaaaaagaaaacaacagggtaatatgatggtaactggtaacagttgtgggtgtcaggagatgtgaaattagataaagaggtaaagcctttggagggagcgatgtttgaactgagaactgaatttgggagtcaagttcactgttagagcctggacaaaggagagagaatctgccaaaagccactgaaatacagccaagtgaggctggagaaaaaagagacattttagcctcttacaatcttattcccgaagtctagctgaagtcgagatttagatcaatatattcagcttggacaatcaggccagcacgttgtcaccatcttttttttccctttcaaaaatgtgcatttctctccaagttcacattcttgccaattccttcgatgcatcccaatcagacctataacagcctagaaacttctggctaatttggatttgactaaaacttttctaccatgacgttatgtaaagagattcaattatggtgcgcagtgttttgtgagtaactaccacccataaaaagttaattaatcagggctgtgtcaatttcctcgtgccatgtcaatttgctgcaaggtaattaatcactaatcacccaccaagcagcaggctgagggacaatccctgagtcatttattgtctttccccaaataaatggcacacgcagccaggaagaaacacatcttgcctttcataatatttttatcgacacttttgcatgttgtaatagactgcagcaacaagcagctgcagttcaatggaatatgaatattaaagaaacaaatgagcagagatttataggacattgcgtttctgtaatgtcagtgttgagattaaaccaagcaaatgaacagtgaaaaattactcttccatgtggagcatggtgattagacttgtacattaattagaaatttttgttttcctattcaatgcatttcaaatgagaatgtcctagaagaaactgtttgtccaaaatgtagatttattcacttctaaacagcagtatttaatatcaacatgcatttcatactgaaacaagggtcaatcccaaatgtgtgtttcagggataaatgtatgtgtatatgagaactggagattcgacaaattaagtggccgttttggtctttctatcagtgaccgaaaggatggaagctttctcccccacccaccacccacccaccttttttttttttctgcgaaactctgaaattactggatttttttaaaaaaagaaaaacctttccatttttgtttggagctagaacttaataagtgccatcatgttaaaattttaatttaaggccatttaaagagagtgacctagttgtctgtaaaatcctatgttataaaccaatttgatgtacttttgagattcgttctgaaaaaggagaaaacatattttgccatttggaaaaaatcaggttttttgattcttcattgtgatgttcattgcacgatgccctgcctcggaaattgctgctctatgagctatggctggtggtttatttcgcctcagtatgttacctattatgccacttcttaatttatggtccagcacatggaatgggagttcccccaaggggaatcctgcaaaaccatcaacccgctgttgaaagcacatctgcacccccagaattgtgtaagtgaatatttcctaccataaattacccacagaacaatttcaccccaaatttgcatgaatctctctccatcttaaaaccttccaaggctggggaaatgtgtcattatggagcaaagggagaggaggagcaggacaaagagagcccccctcatccattcggatgcccaccttttccagggcatctggcagtctcatgcaaattcaaaccagtgcacaaatgcaaagaataattgcccattaaagcggttgtatatttttatggctttggtgcagaatccgcccccctgtcgggttttgcatctgctactcttccatctcccccagagctctaaaactttaatatgcagtttataaccctcaagtattttccactggttttgtgttttttctcttgggatttcctggctggtgagatgatctcatttgtgtttattttcgaaggtaagcaccatgttcgtaaaagagggagagaagacacactcatcactgtaaatacattgagtgcagggctcattggaggtgggaggtgggggctttgtttttgagggggagacaggcagttagcagttgacactttagtaaatggcccatttggctggtggatacacccacacatcttccgttctaaaatgttgatttgccgtgatacttgagcaccaccacagcgtgcctcttgttacatccctaaagcttccatttcatcgagttccatgggacagaacttcttattcccaagaactgagatggttactctactaacctcccccagaatatgctctgtatataaatctagctgaagggtgagagtgggtgggctggaaattctcatgtgtcaacaagatgctcaattggtattttctctgaaagctcttgcctgttttgagagaaattcatttttagcttatgagctgaatccaatttgtgttgtagtgataccagatttttctctttgattcatgctggataaggcttcagaaggaatctcttcagtataatgaacctatgggttttcttgtttccctcatgccaaaaactaaggatttatactatatccacaaatcaacctgcgtcctttccattgttccttattgatggtctgcttacatgtgagttaacttgaaattgaactaggaaaaaaaaaaaaaaagcaaacttgcagtgctggggtttagaaatgaccattgtttggtgtctttttcccctaacattgttttttaattaacaaagaggcatttacaaatactggatagggtgatgtttgacttttaacattgatttaaatattttatttcatattctagaaatggagagaacattgtgagtttccactgggcattttgcattggctttattaaatagtcattcattgcccacttactggatctagacttctaagccagggtatttggcatgtctggatccagacatctaaactaggatagatgacataactctcactcaacaaaatataagtgccatacctcaaagtaaacatgtaagaggttctctttctatgtggtcaaaaaacagttttagtcttgtttaatttgtgtctgaatcatctgtccaggtaatcatctcaaatatacattttaccatgttccagaatcctacagaccaccacacctgtaggcaaataataaaagcatccattcttccacactgtgctgggttttttaaaggaagtgtggcaaacagttgtgtgtgtgcatgtgtgtattttgcccttgaaatggattattcgtgttagtggcatgcgaagaagccatgttgtccctaaaccaacaattgaggaaaaaattatttatttatttattttttttgagactgagtcttggtctgtcacccaggctggagtgcattggcgcgatttctgctcactgcaacctcctctacctctcctgggttcaagcgattctcctgcctcagcctcccaagtagctgggactacagatgcataccaccacacccagctaatttttgtatttttagtagagacggggttacatcatgtttcccaggatgatcttgatctcttgaccttgtgatctgcccaccttggcctcccaaagtgttgggattacaggtgtgagacactgtgcctgaccaggaaaattcttctaataaagatgggaagaaacacagaaggcacagtcataagtcagaagagtttggaattatcaagattgttattttctattgttcctggttgcacataattattttattcagggactgttgttgctgggttgtcagagagcatggtctggggctatatggaagggtgagatgtgatgaagaccctttaataggtgttacctgtctggggccaaaactggagtcccgcttttcccctgaacaagaaacaattttaaatcctgatagtgtgctgccatcgaggagaatttaaatgaattgagggctctgacaattccaagtgcaacaaacttggtccaagcagcctccccttgcttgattgaaatcatactctttcaaaatctggttactttttccgagacagtgaaaaacgtacaagggtagaagtggaaattatctttctagggattgtgactaagtttcagttgtgttacaggaaaagggttcctatccagaccctaagagaggattcttggatcttgtgcaaaaaaagaattcggggccagtccacagtgcaaagcaaaaggaagcttataaagaaagtaaaatggggaaagtacagctactccatagacagtaggatgttcccaaaagtaagaggaggagcatgtccaccccttggtataatacttgtttatataggataaaaaaaaataagatcatggggaaatgtgctctgctacaagggtttgtgataaaggattaattttcttaattactatattttgcaagaatcaatattatctttaaagcaaatttaggaatgcttctgttcacaagatattgggatatcaggacactcctaaagtctgggtctgtttagtaaacataatcaatctgtttccttaaccacaaacatctagaggccaggaatacctaactttctggaaatgtagtccagcatgtcttggcctcatttttcctagccttcacttacgatggagtcgctgtggttcgaacacctctaatggttgtgttgcttgcatgctgtttatctgcaaattctgagcaggtcactttgtacacaggacagtgttatagaaggtggacagtgaagaggtggtggctgtactctcccagaaggaagacaaacattggttaaccactgacagggtgtccaggcacagtattaggtacctgatacctgcttggtaccagttactcatcctaactgatgagcagaacgtggagatcaccacccttacgcagcttgcatgcacgcaccagtaagcgtccttctccttcatttctgtgactcaagctaatgatttttacatgaaccaggggaggaacagggcagccctctttagaaaaaaaattccaaagtgactgaaaggaaggattgtaatgaaggcaggaattaataaagaaatgaagggagaggagaggaagaagagggagaggaagaagagcgaggggagaaaggaaaaggaggagggaagacaaaaggaagaaagagggagggaaggacaggagggagggaagacaaaaggaaggaagaaaaagggaggggagaaggaataaaaaaggagcaagtataagaaggaaggaaggaatgtaagaaagaaaggaatgtgatcgatgagcatttttctaactagagatttcacgaaagggccccttggccagccctagattaacaagaaagagaccactgaaaataccaaccacccaggacacttgaatcctccagccctttctccatgaagcctctggcccaaagcatgacctgtggaactctcttttttttttttttttggccaagggtacctagccttccaggaaggcactatttaagccaggaattgattttcagtccttcctgtgttcttttcacaaaataagaagtcccccaatgtgccctgcttgggagagcccaaagaacctcctaggaagccttgtaaatatcctgcctcaggaaatccattttctccctgtaatgaagagggtacaaaatggaatcctggctccacgctcttaacagcacgtgctcccctctctctctcttgccaagcttctgtttcatgttatatctcaacatctaaatcctccaagaattattgtaaaagctgcttgtggctgagagggagcttgtctggctcactcggctccatagccagtgacaatgaatgggtcagcataattaccgtgtttcctcacacaggcagccagctgctctgccagattgtgaatttttcattttctttatttcaaaatccagggtgttcctctgaaaacttaatagttgaactgtggcaagacagatttggagtcaaggccattcccactcattttctccccagtcctgaagcaagcgtctcatctctcattacttatgggcttttatgatattaggatttactcgtgttccccattaagaccccacacgtctctgcggtttcaagcataccagttgccacgtgatccaagaaactcaggtgctaggagctggcaaaaaaagttaaataaaatggcatgatctatctttagcaagaataaaaaaagttaaaaataacctttatggtcttctcagatacaaatagaaagacggaatcattctgggttctacaatcctcgtattttacccgcattgtgatagaaagatgcggtagaatccatagaacaggacggctgtgggacctttaagaacacacagaattccagataatagccatttggtcttcactttggtcgggttcgggggttttatttgggcccttaaaattgcaagagtaatttggaatggctgctgtggcaaaccccacccgctcccttcacccaccatgtaagtacaaacataccctatctatgggtgtaggtgtaattcttggagttctaagtgcactacatggtcaccccgtccaacctccttggtcgcagccagggcctccagtgaggcttctcatgcacattttttccttccaattcttttgccttttgctccttctgcaaccctcacctgggtccatgcatcagtgtatgtggaaaggactctgaataatggggagacataaggtggaacgcttctactcctgaagctgatagcgggaagggaagaagctcttcttggcagtttggatagagggtggagacaactttaacatgaaatgaactacaacccctgccccttgagaggtttgctcttctgcagaaagcctggaaaaggagttggttgtgctgggttaactaagagcatttccttcatggtgggccttttgagcctttgctgtggctctcctgggacagggacttaccaaatgcattttttcagaaaagcattctctgtggacacagtttgggaaacaatacctgctgcttagtgagatgggacaagcgtagtgagtatggtgagagcactgggagggttagagaagcgaactgagcttgaaggaaaagtggtttgctgactctgtgggccctgatgagttaggatttgcatgagaagggaggaagggcatcccaggtagaggaaacagtgttggttatcaggggacaggggtaaccggggtaaccatcaggcatcctctgcggacacagtttgggaaacattgcctgctacttagtgagatgggacaagtgtggtcattatgctcagagcactgggagagtcagagaagccaactgaacttaaaggcaaaagtggtttcctggccccatgggccctgatgagttagttaggatttgcatgaaatgggaggaagggaatcccagatagaggaaacagcagtagttatcagggggctggggtaatcatcaggcttaattccccttcctaactcctcctcacctcctcatcttgctcagagaattttacccaagggaagatatccccgcccacattcttcttcttatttgagaaaaagtcttgctgtgtcactcaggctggaatgcagtggtgccatctcgactcactgcaacctccacctcccaggttcaagcaattctcctgcctcagcctcccaagtagcgggaattataggcatgcgccaccacgcctgaccaatttttgtatttttagtagagatggggtttcaccgtattggccaggctggtctcgaactcctgacctcatgatccacctgcctcagcctcccaaagtgctgggattacaggcatgagccaccgcgcccagcccccacattctctttttaagggtcggggtcccagacttatcgcgtatttgtaatcatgctggttgcctttgcctttaaatgctgcacaggagttcagcagacttatcagatgttggtaataagctgtttctcatggcatgtgtggtttgtgcactcataccacatacatgtgtcagtgggaatacttcaattagaagttttaagaagtgatatctgtacatgaaggaaactggaaaaataggatgggggaaagttatgaataaaaaccactcatgcagttcggccccagagattgctagcatgtggaaagttgtgtgtatgtgtatacaaatatgttcatatcagcatatgtacatatatgtatatatacatgcacacattcatacacatgtacacatgcatatacacatatgtgtattttgcatgcaaatacacctgtacatatatacataggtatatgattgataagacatgacacatcttgcaatctgcccttttaaaaatatgtttgtgggttgggcgtggttggtccataactgtaatctcagcactttgggaggtggagacaggaggactgcttgaacccaggacttcaagaccagccggggcaacaaagggagatccccatctctacaaaacatgaaaaaattagccaggtgtggtagcacacttctatctatggtcccagctacttgggaggctgaggtaggaggatcacttgagccctggaagtcgagggtgcagtgagccgtgattgcaccactgcactccagcctgggtgacagagccagtccctgtctcaaataaactcattaattaaatactcatgcagtgagcttttctcccgttatatagaattatttgcaaatgtttgtcagtcaccacattctcctgggcaaagggcccactgtgttaactactcatcctctctggagtcccaccctggccaccgtgctgctctctgctttttaacctcttgattccgggaagcgggcgggggtcctgctgggaccctgtgcagggacaagggttcccggggcagttccctccacagcagggtgtgcatctgacagcctgtgctctctctctctctctcctcttgccccgcagtgccaggcttcccgtatccagcagccaccgccgcggccgcctaccgaggggcgcacctgcgaggccgcggtcgcaccgtgtacaacaccttcagggccgcggcgcccccgcccccgatcccggcctacggcgggtaagtggggcagcctcctgggtgggcctccctgcaccagccctccctccccagaggcacggagctgtttgcgagcgcatgatggtcttgactccccctccgccacccccagaaccgcccccagcatgcagcccggccgcgcacctgcagtggagcaccttgctaagagtattgaaaaatgagtgtaatttgtcctgtcatggttggtgcctttaagcattctacatgtcacatgttgttatgtaaattctctttgagactgaatgctggagaacagagaaatggttacagccaaagatgtatttctgatgattgcaaacatctggttattaaggaggttggaccacatttgccccttgaattcctccacagaaagaagtgaggttttcatacataaaaatcactggggtcgtcttgctcgcctccccagggatatcttggcttcaagggtcacgaacctttgcctgcaaagagaaaattaggtgttgagtcacatgcaaacatacaagaattaatgaaattggagttaagatgcgttgcagttgcgttttccaaaatggcatttgccttcctttctcctctgtgggaacaatgcagattagtttgtttcccattgccaatttggtccttctctgcacagactttgatattgccaggcgaatgtcaaggaatggtgtgaatgctcagtaaaagaaaaaaaaaaatgatactggtgtgtttggtggcagtcttgaaatgctagtctgtccctcttttaaggctcctgctagaatattcttgcacctctgcagccagggagaaagggatacctccaaggcagtggccctagaccaggggacatttgcaaggtctagagacatttttggttgtcacaacaggaatggagagatgctatgtcctctattgggtagagtctagggatgttgtttgacagcccccaacaagaaagaattatcagactcaaagtcagtcatgctgcagctgagaaaccctgctctatgttaaattcagcgatccccagaaagcctggcactaggcttccctggccagtgactggctttctggtgtgtagaagaaaatatggctgcatttaagactgtgtgaaaagggttaaatgcccttttcatagctctgttgcttgtaaatctttcagaaaatctacattagcctagatcatctattatactcatgacaaaaagaaacactttttttcattacatattcattctaaaccagagcatttgaaatgtttgtttcaaaaataaatgcaataaagttaatggtaaaaagaaatgagagtaggtaaaaccatcagagaagggaaagttaaggaaaagtagtaagacaaagtccatcaaatttcttgtgtagtcatttgaattgggtcaactttgagcttcttggacaaaacaagagctctctctatgcatacacatattttaactgaaaagacggtggatagtaacaaaccaagaatgaactggctataaattctccctaatgcctgtcaaatgtatttgtatgtcttaagccttttatgtgaccatgcaatataaggagttgtcgatagtataatttttatctctggtatcacagcaatgagcccattttatggatccagaaatgtaaaaataaagatttgttattcccaagatcatgtaatgagttatgaaggaaaaagaaaatcccaagttacctttgggctcatgtaattactaaagcaagatttgtatgctataaatccaaaattgcacttataccacattcgtttgaaaattgttctcagtacatgggagttgaagggttttagtatatctaccatcagtatctcactactatattgaagagcaaaagaaacaatagaggaaaattatatggtttatcctcacatgaccaatttataaacatctcagaatgacacacctgctgtaaaatcaaaattaaattagctaacttataatgaacatgctctttgctgggaataaccatgcataactaattaatgccatgtttcaccagggagagacacaggcatttccaaatgatgaaacaatgtgtttgtaactacttgggatgaaaattaattttaatattccagcaatatctgtgatcagtttggttatagtggtggattgtacctccttgctgataatagtatggctggcattctaaagccatacttggaagcaagatcaaattctcagcagagaagcaggagccccagcaggactaagattgcaagcattcatgtctgcaataacctattagagcaaggtactggtcaaaaagaaggaaattcgtcttgttgcctgggtgtttcactggattacagactcctgggaatgaattggcacggaatgaaaaactttgaggccaccatcttagaggtttccttttcctctggaataaacagattaggttgcaggagatggcaaggggatggctcctcttggaaaggaagagagcagagtgggacccagggcaggagctggctggaagagcaagaacccctatcttgtgttcagggagagcaagaacccctatgttgtgttcagggaaagcaagtagcatagaggttagaaatacttgttttcagaaagtaacatcatcaggattcaggtggtccagagagcagatttcctgtagccttttatctctaaattcctttggaggaaaactaagatttgactgacgtctttaccccagcccagtgcagctcaccctatgactcacacctattgtgttttaggcactgttgtgtgctgaagagacaaatggcaccttgagaggtatttcttctggttggggcagggggtgacatacaagccaacaatttcaataaatgtgataagtgatacaagaggatattgtgtgaacactagggaaaggtccttagcccagcttgggtgtttacagaaggcatcccagaagagaagaaatatggggtatatataagtccaaacatttcctaaattgccacagtgaaatcttatcctgtgacccctcctccacccacacccccagcaatctccatcttttctaagatgtcacctaacaaactacatttaagaatttgtttccactgtcaccaattgaaggcatatctgccaacctaaatctgttcttcctgaagtatccaatatgaatctatattgttactaaaataccagtcaaaaaggtgtcctaggtccatgcatggcttccacattttcttcctcctgggagattgaagaaaatatcctttaggatctccatggctacctttatggaagcttgggtaacccttggagatatccaacataaagatagtcacaccagtagagtccctaaggatgccctacattcatccatttccttttaaaaaaaattttttttgagacggagtcttactctgtcacccaggcttgagtgcaatggcacgatctcgactcactgcaacctccacctcctgggttcaagtgattctcccacctcagcctcctaagtagctgggattacaggtgcccgccaccacacctggctaatttttgcatttttaatagagatggggtttcaccattttggccaggctggtcttgaactcctgacctcaggtgatccgcccatctgggcctcccaaagtgctgggattataggcgtgggccactgcgcacagacattcatcaatttccttttattgatttgccttttccttccatgtcttgatattttctgaagcccttccatgcagctgaagaacatcggttatgaagaggcccttttttgtctcacatgcctaaatagaaacctcttgggacattaacacatgatcattcctccaggggtagggaaagttgtggaccatggtgggatcataggtacaagtggaaaaccctgtaccaaaccaaccaactcccaattgattgccaacatcaattgaatgagactgaagagttagaaagtaatgtctacatagcctatggaattttatagtcctaggaagacactggatttaaggtaaataagactgggccccaatattctacccatactggcttggatagcttacttaacgtctatagacacagtttgcttaagcgagagtgggggatatatctgcccccatagagtcgatagagggtgaagcagggaaatccatgtaaggtgacaacttggtccatcttatgacatgcattcagtgaactgtacctactgttctccaggttgatgaacttagcgactttattaaccacccacagtcttctttctcaacatcccccttttgcttgtggttgagtacaaaagaagatcccatgtctctccctctatgcattatttatctttgctagggggcacttgcagtttcacagacctccatttccttcaagccacagaaatggttgaggcacttgcattgcttatggaatatgtagattgaaaatacaatattgagtagggaacagtcacagagcagagtagagttttccttatttctccttgcatttgatcctggactcaatttgactgagaagccacaatgcccagtctagcttcctatgactcacatttgggaggaattacccatcaggtaattgctgttcagggagctcacaagctgattatctgtgcatcaagacagcaagtggaggctttggagacaaaccctgtagacttagtatctttgatgttagaaaacagcagctaaatcccaatcccctccctcaaagaggaactcgatgagtacctattaggtaccgtgcatatttcatgtgagtacaatggggtgctctaatggagcatcacatgagttatttttgagatggagtcttgctctgtcacccaggctgaaatgcagtggtacaatctctgctcactgcaacctcctcctcctgggttcaagcaattctcctgtcttcagcttcccaggtagctgggattataggcacatgccaccacacccagctaattttgtatttttagtagagacagggtttcaccatattggccaggctgctctcaaactcctgacctcaagtgatctgcccacctcagcctcccaaagtgctgggattacaggcatgtgccaccgccccctggccatgtttttattattattctaagcctaagcatctagtgtcagctgtaggcttttggtcttgttctctaggtatctctgagtaagattttctgccctttctcaggtaattgtcatacatctgtgtaaacttcccagagttaccttgagaagtatttgagaagactctatattatttggggtataggaaagatagagcagtatcccaggagaaaacttaaagctggtcagtggaagaacaaatagatcctttggaaatgttttcacgttaagtcctaaaaaagtctccaacaacagtctctgggactatgggcatatctttctgtgtacagatcagccatgctttctggttttatcttctaaatatctaaatccgcaacctgtagtatctgatgcttaggaactgtatttagtataaatactaggaacaaaagtcatcattacccattctcagaatactttagacacaggggcgtccaatcttttggtttccctgggacacactgaaagaattgacttggaccacacataaagtacacatacactaactacagctgatgagcaaaaaaagaaaaaagaaaaaaaagaatctcataatgttttaagaaagttaatggatttgtgttggggctgcattcaaagttgtcctgggccacatgcagcatatgggctgcggtttggacaagctgcctttgcagaattctttttataaagtgtgacttcttatttgctagttttaaaatgtaatccaaacagcctctgaatagcatgaacttatagacaaacatgatgaataagtggtctttaaagcctttttttggaggggagaatgtgaaaagacattttcacagatgcctttaataatctgattaaaaattctctaggaaaatacgtacaaacagcacacacacacacccaaattctatacacatgccagctagtttctgatccccccaatatccattaaaaaatagcggtatttgaacaccttaaaaagtttattttctagttggaaggggcctcagggtagaacaattgtaaacagccttttctataagaatatacttgtggctggtatatatcatattacacgagcagattgtatagtttgggcattttatactttttttttaaagtaaactaattttctgtagtgcagtcactccctgctcgcattcattcaaatatttaactactggtattacttttctaagaaaataagatgtgcatttgcattatgtccttgcaaaagcacattgagtcccgatgtgattgacaaacaatacaagtacctttgcatggctagacggaccatctctgcattgaaatatgactgcgcctgtttagtgcgcaatggtaactcccttctctcctaactgttccgtggttaatttatctatagctgcaccgcagacatggatccctgtgcctctttccctgcatatcttatattttaagtgcagctgtttgatgaggctttacaaattatttggatacatttttggaaactagcatgaggctttgtgatgagaactttcccgtaaccagctcctccattagaatataacctaggaggctgaccttcagttttgtctcaaatgtaaagtaaaataacacttggaggatggtgttgcatagagctatgattctcatattcctgggaccaatagcatccgcatcatctgttaacttgttagaaatgtaagctcttagatgctgtcatccggatctattcaatcagaacctgttggctgggcatggggcccagccatctgtgtttcaaaagtcctccaggtgattctgctacacattcaagtttgaccaccactgcctgccatagtacttaagagtttgcactgtggagccggaccccctgggctcaaatcccagttcagacaatacccaactctctttcagtttctacatgtctaaagaggcaatgatcatattgtccatctcatgggggtattctaaggactgagtgggatcatgagcacagaaaggctagactagggactgatccatggtaagtgttctgcaaatgtgagtagtgggagtaatggtgctcgtgctgttactattagggagaaaaacaatgttttggtaaaattggcttcccattacatggctttatttcacactgccggtgaggatggctacattgcttccacattttttagagttatcctaaagatagatcactcgtcctttccatttctctccaatacatgtgcactttgaaaacaagtaatcccttcatgatggggtttataatggcagctacaatcatctttttgctgtgaagccaccatatttagaccctaatgcttatacgtttccccccagccctccaagaagccagagcgtgggtcttccagccataggtcttgccttgcagtaccctcaccccaccaccctttgccttgacagcacttcactcctctctaccgagccaaggctttgaggtttctgtgccatttgcttagcctctctcgtctctgctgctggccctgcctccttccgttccacattcagggcacctctgttgctgtctcctgcagtatctatctcagctgtgattctacagttttatgcataatttgtgactgtgtgtcccacttcctgtacactctgggagggcagggttactgagggggctttcttcttcggtcttcatgccttcgcatagtagttggggtacaggaaagctttcagtcacagagaaatagtatgtatttggcttgtttgagcttttcacaatgagaaagctacactagttcttctttggttcagtgtttcatcaatgtaggatgtcagcaacacccaagtaactttccatagcccacagtggaggacaaagcatggcaatcaggttaccctactgagcagagactcctaagagcaaacatcccggcatgttctttcctcacctctgggcaatgttggtacaaataggcttgacatggaggcacaaaactggccatggtgcataacaacttgtcttaatgaaagaagggatcagtttcttggccagagctcagcctcagccatatcaaagaaccccaactcttggcccacacccatgccatgtgccccgttggaacagcctccaaggcctgggatcaattcttctctccgtcatttacagaagatcagagacagatgaggttccaccattgagatctttagaagtcattatttcccatatttaaaagtatgtttcatatctcatgaaaaatacattgtttacttctagactgctgtctagtctcttgccctggtctcctaattcaggttcgagtctgttaatcgtatttctcctccattgacaacagccactgatactgaatagccaaatcagagacaaacctcagactcctcccgacccattattgaattctacctggagttggtaaagcaatgactcaatctccttctgacgccttctcatgcccacccttccctctaaaatatgaaccctattcacccagttattgtccatcttctaggtaacaagcagtgtgtcaggaactgagaatagaatgttagttaagccacagggtgtagcttttaaggtgcaacgagtcacatgcacacagacctttaatgtgaggcagaaattgacgagtggctctgataagagtctgaaaaatgatgctggtgttcataatgggaaaagtcacccagctgcaggtgggcaccgggtctcaaacatggtgacctcgttagagctacagtgttaagcatgatgccacccatccctttgcaagcattatcttacgaaaccctttcttgaggtaggcacttacctattttccctttttaacagatgagtaagtgaggttcagatgtctcaagtaatatgtgcaaaggcactgcactgttgattgaggatgctgcagtctgattcaaatgcccatgtgcttcccatctaacttggctcttgaatggtcatgtcactgcttttggatgaggatactagaataaagggcattgccagcacaaggcattgcacgtgcaagggcatggcagcatgaaagaatgggatggagcggttttgatatggctaagtgatcagtcctgtggtttgggacccaaactaaatatctgttgctccctctctttcatcagaccttggcagagggtggctctgccttctgaccccccaaccgacattctctatgttggaaaagttgaaaaagaattcaaagcatagctcaggacgatgcacacctcagcatcttggattagggctttatgccacttcacaagcgctcttgtgaactgtagccctcccggatcaaatatgaacaacagctgaaagctattcctaccaacctccttagtgtgtgaaatccctgccacatttttaaggacaatggtacttggagtttagtcaatcaactctgaaatactctaagcagcacactagagtgttctccagcaaaccagtgtcacagctgcgtgtgtgtgtcagtacagcgtgtgtgtgtgtgtgtgtgtgtgtgtgttgtaaaatgccttcccttggctcaatatgctttgcttacatgtgggttcattctgctacagaaacctgctggaatcctttggtattaaagttgtgtttctattagaacctcagcttcattcaatggtggggctcattggtcctttgccagaatcataagtcatctagaaacatcatgggaaggtatcggggaagattgtaaataactatgatccttttaaaaataggcatttagaaacagcttcatatgcaagatgccttgtgatccttacaaaaacctgtgaaggctacatatgattctcgttaaactcgttttcatgcttaggaaatacaaatcagtttctcacgaccacgtagctaagagcttcttttcctggttgttttactcaaagcataccaaaaagcttctggggaatcattccctaacccctgtccccagccctctgaagtctcttctttctgggatggtcactacatgggtggcaatcagagagctgctatcagattgggcttgttcaatcaaggtgtgggtctttgtttagtctagatataatttacgtgaacatgcagatattcacatgtatacacccttgtacatataagtacacaaatacatataaataagtatacacatgcatatatacatgtttacatacgtgtatacactatagacaaatacatgcattcctgcacttgtccatattaacacacacaaatatgcacacaatgcacttgtacacatgaagacatgtctgcacagaaaacacattcttgcacatgtacccatgctcacccacatactattagagatattctccattaaccataaaataatgcacgtgcaattaccaaatataatacaatgtgaaagaatatagaagaaaatttttgaaaccatatgtgttgtccacctcacctaaggccattcagctctagcccatactgagaatgctgcaatctgtgtgtcgacctttacaatccgatttttaaatagatgttttgggtttttattctgtggggtagggggctatgtggtttgattgccaactctgacctgttaagatgctcatgtctgtctgggccacttaaatctcagtcctctttgcatttcaaagtcgtgcctttctgtacccactcctgagagagtgggaagtttgggacctagcacaccgccaccaccacatcctaattctgggccaacaccaaagcccggcctaattttctcggtttgctcaactgccgttgtctccaacctccttaatccaatgtgaaaacgatcctcggttcctgtgttttggatcttgtgaccagactaacctcgccagtgcaggggttggtgtgtctgcatgggaaatgcactaatatggatgtttctctttgtgtgtgcacccttgcagtgttgtttaccaggatggattttatggtgcagacatttatgtaagtattcattcacgtgcatgccatccccgtttcctcctggagtcattctttttacaagtttgctgtgaatttctctacttggcgtagttgagtttctctccttggtctgtaggaaataattccgtggtttgtcttgcaggacagaaagccttctgctcttgaacttgtggcagacatcactggctgtttagtggggtggaattaacccctcgatcaacttcagaacgaatgcaattcccccaaaaaggtggcatttctttcatgccaactaaagaccccacttcacccacaaagaaattgtctctcaagttctcgatatgttcttcgttttcagtataatatttaggataacagctgtagtcaccagctgcagagggttaaaagatattttcatggctgctatttttgatgttttccctaaaatatcacagtagccttaggaacactctttctctctctagacatggacaagtttagccctaaacatctcctgattctcttaatatgtatgtcaaattgaacattgagcccccattttctttaaccttttattccatttcccccaattacctgacttaaaattgcttgctaaatagtaacactttaagtttatttttagaaaagagtaggctatttctcattatgagaacaagaatttaactatgttcatctagaggtagttattctccgacattatgatatgagcattgacgatatgaaaatgacttggagtaaacacaattttgaataagtaggcagtgttgggagatattccctaaatcacaatttttattacaaaagacctcagtcaatgggattatatttgttttacagactagatagcaaaaaaatcatatttctgatgaaattggtatcatgtactagaagatgaataaggcactgattattgtattccttttgaatttcaaatcattacaattttgagatatagtatgtatctccatcaataatagacttagttgagttctactattgcatcaagtatacttactataatctgtgggttagtattttttcccccgtaataaaatgagtgaacaacccatatgtcctaattcactcagtgatcaattttcttcttttttgtggaacttaagcttttctgtctcatgtcctcttttttcagactttcagattttaaattatgaggcaggctggggctgagcagtctgaagcccattcatttcctcaggcacctgctaaacccaatcaccagtcctggctctcgactccatgcagcccatgggtagattattgcagatgggaggagccagaatggtagttggcatcgcagaatttagggctttagaaatgaaagggaatagacaagggatagagaaatggttttttaaaaaatccaccaaaatggaaactatctccagcaacacctacccaagaaaaaaaaaatgcagattttcctgagtttagttaaaagtatttcacaatcatttagtgagtgtccacctcttcacgcctcagtttcttcaaactgacaataatttattgaatcattaatgtgtggtgtcttatgcagatatcaaattggtgtcttcttggcctcagattcttgagtagcaggaaggagaggctgcctgaaggcagggtctgtggagctcccacaaataaggaaaaagaagggactcatttaagtgagtgcgagtgtgtgtctgtatcgattggggcatatcgctgcatcagagaatccacagagcaatgcaaatagagaaaaaacaaagttagaagaaggaaatatgccaaccacttgactagagaggaaaaagaaaatttattcagggaagaaagccacagaagtgtccctttgtgcttttctagttcctttaggagattttgtctctcacacattcatcatgtttgggccaagcccactgggtgcagcggtgcagctcgggaagcatcagggtgagcttcaaggacagagtttcttccagtcctaagttgtctgatatgtttgttcataaaactgccctttctctgacttttcaggccacgacccccagccagaaattatcgttttccccactctttatattataatgacaataagatttttcagtgggggagcatcacatatgcaatcaggtggcagaaaaagttcctgcaatatgaatttagagatttgattacccagcacatgtttctgtcctgtctctaacagtctctggaatctggtagaccttcctgaatattttgctttgtctgatgatgactttaacatattgctgctggtgtgcatccgtgtgtatactggacagcaggaaactagcctgtgccactgcccagctcagcagcagaacaagaggtctttgatgaccataagtttaagaaatataaatatgttctgcaccacagaatatacagaacaagattcatcctagctagaaatatatcataatcttgaatgtgctttttaaagccactaccctacctcccttgagataccagcatgttctgatgagtggaaatatccccaagcttcgtttttaaaagagatgatggttaaacagactcttagaaagtcatgtgagcttctactttaaagaaagattttggcttactccttcaagctcgttaaaagtagtacacaataaataggtttagggcaattgtcaacggccccgggatatatgttagacacatcagatacctcgaatagatttaaacctctttttgttattattatattttttgagacagactcactgtgtcgcccaggctggagtgcggtgcaatgtcatctgtctgcaacctctgccccctggaagcaattctcctgcctcagcttcctgagtagctgggattacaggcgcctaccaccacccctggctaatttttgtatttttagtaaagacaggatttcaccatgttggccagggtggtctggaactcctgacctcaagtgatccatccgcctcggtctcccaaagtgctacgattacagacgtgagccactgcaccaagccataaacctcttctttttaagtttattgggtagtcagtttctagcttcggtcactgctaaggaagacaaaggaggatactgtcagattcttcctgctcaaaatgttctccatcctggcagtatatcagagcaggtcaacaactcaacagcttgcatctcagaactactgggcttttctaggtgccctgctctctcccctcccccgtcctttgttcttcaaggtctttccatgcctaccacctgaggttggagccctcgggcattttttagttctgccaaagcacatagtcattgaaagacctgcgtgatccctgtaactggcaagccacaacctcttctctcaaatgacctccttctgaaagttttcagaggaaagaggattgaacagagagggacagatgatcacagatatcttgaaattgccaaagggagtagacttgttatgaaatgctgtgagccagacacgaagggaaaaaaccaggacagctcatttgggcagagagcaaagacaaagccttcaatcctattcaggagctgagccctgcaggaaacccactgcctctagccacagtggagaggtgcaggcacagtgtggttggctactcatcggaggtgatgcgggggttgtctgagaatggagggtaggaatgatctttatctgagtcccttctacctgagaacagaacagaacacacacacacacacacacttttgtataaaaagatagataggaatttaattttcataatgaaacatatcaaatcttttgatatgttcactattattgcttagtggtgcacctttaaatacattcattttaattaaaaagtggatcaagttaagcaaactaaatggtagagtttatacaaacagagttgcaatgcaaggactaaggttcttagatctacagagtctctcatacttggaagtgaagctatagatgttttttgaggtggaatctcgctctgtcgcccaggctggagcacagtagcacgatctcagctcacttgcaacctccgcttccagggttcaagggactcttcaacctcagcctcctgagtaactgggattacaggcactcgccaccatgcccagctaatccatgtattttagtagagatggggtttcgccatgttggccaggctggtctcaaactcctgacttcaagagatccacctgccttggcctcccaaagtgctgggattacaggtgtgacccaccatgactgacccctgaagctataggttttatgaggctagaagttgaccaaggagtggaaaacaagcattgcttaactgaaccaagacatctgttggttgaccttctcagaaagagaccaaaaagtatagcatttgatcaaaagataactattaatattacaaatgaaaagagggagagaaagaaattataatgaactgttaaaaagaattgacaaacggatagaaactggaataacatagtgaggtgtgacaatggtaagagcagagagaaagagtgagaggatatagagtataaatgttaaccttgttcctttttattaagaacatcctaagcgtcctaacattagacgcaaccatgagggccgcctagcaaatatgtcttgagattccagtgcatttttataccattcctaaattctgtataacaagtttctggttaacaccatggctaaacacaattatttctgaattcctgtcactctgccacccatatgttttaaaacaaagaggtatcctcatttcactgatgtttaaactcaggaatgagatgtgtcagtagctttgggaacatgtaaagctggaaagtaggaattctttaaataaaaactcctagtctttcttcctgagaccttgctttcagtgtgaggtggctgaggattggcatttgacttgccgtccgcagtcaccatagtggagacctcagtccaccaagaaatcaggcgaatgctgtgtttgcaatgggagagacaagatgttgagtgttttacctgtattacgtcatctctcctcaccacagcccttgaaacaaggaatcttacctctatttttctgttgttccagaagagaaacttttttgggagacatagcctccctgtatcacccagggtggagtgcagtggcatgatctcagctcactgcaacctctgcctcccaggttcaagcaattctcctgccttagcctcccagatagctgagactacatgcatgcaccacgacgcctggctaatttttggatccttagtagagacggggtttcaccatgttggccaggctggtctcgaacttccgacctcaagtgatccagctgccttggcctcccaaagtgctaggattacaggtgtcagccaccacgtgtggccaacaggaaacttttttttccagaaaaaaagaaaataatttgtccaaaaatcttcagacactgggccttgagcccacatgatttgactactgagtttaatgctgaagccctgagcccacaaactcaagtcattgcgctagttgagcaatatttgaaaagtacggtgaaagatgggaaaggaagagggagagaagtaaaagcataacggggtggttagaccactgagaataatatttgtactggaaatattcaagtaagcagtgaactaggagcgaaaggaggagagagaggaacaagaatgttatcaggcatcgctccgtaagcttagacttttaacataaggaagcaaatttaaactggaaaggcaggctatgtaggaaaaagtatacacaagcctttatagggtacgtccctcagtctcttcaagtgttcagccatctcagtgtctgccctagaattggagaattttatttcaaactgtgaccactcacatggaagattaatcttgaccatgaatgactcttatgtcaaaaaactgcatcctagtccgcacaaggattctacagagaccttccttgccagtgctagatttgtatgaaatgatagcattttgatatgtatattaacactagtttacacacacgcacacacactcatatatactcacagttctctagtctgaaagtattaaaaggagccatcgtagcttcagtgtaattcatgaattcatgaactgcaattttgctgttagttgaaattaatttaacaagtaaaggcatttatgcagttatggttgctactgtgctgttttcttaactacttcaataataaggcattcatcttaaatccttagatattccagaaaattccaatcatgagataaagagatgaatgtgaaatagttaatttggactgttggaatatgctttaagaggcaagaagccatgaaattatctttttcttctttagaaataaacacaagttataacacaaagtggtttgatccccatctccaccttgatactctccattgcagagatttgcaactaaaaatgtttgtcgatgcccagtgcccctttcagcttggtgggccagtcccaaggcttggtgaagtaagagagaagcaaacttgtaaatgaattgctctggaatttgtctgacttatgcattctcttttatttatttcatttttgcattgaaaacattacatttctgtttccttatagagtagtgtatcaagagcctgtgtatggcaataaattgctgcaggtatgaaatcccgactggtggagaaactcatcactatgattgtgggtttgctgtgaaatccttactaacaagataattctggggaggggaacagttctctaacataggaggaaagacttaactgaattttccagttttaatatgaaatctcctagaatagaggtgaggtggctatccctgtatctatcagtatatccactgtgttgtggcagtttcttccaaatatgggtgctgtttccatgactgagtgctgttagctggcctcagccatgagctttgttagatcctgagtgtgtcaaatggtggtctagcttggctgttaattttttagtttaaaagctatctggactcaatcagtataaatccaatgaaaataattcaaggttctaattgaaccaattgtctggataattttttagtaggttcccagagtgaaccggaatggggttaaatcaagaatctcatgtgcaacattaagggccagcatacctgacatctaacataaccctccctggtcttagtagagctgatcagaaatttatttcaagcctgttgttatagcttttaaacctatttctcactgctaaagcaaccaccaactgaacaaatttgtaggaagaaaaaaagtcaacatattcattggaatgtggctggcctagagtctccaaatttggtctattacccacattgaaaccgtcaaataagatgaatgtcaaactgaggatgatcagtgagagttgtaggacattactttccctatctctgcaattcccttttttcttcagtattatgagtgaattacgaaagtactttttgtaaaccatgagaattgactgagttttaattaaaacctgaatgtgagaaagaggtactttgacctagtaaagagcaatatggttaaaattcctgagatgaactttcactgtcacatttcaagagaactggacctccaactgccacccttcaaaaatagatggatgtggccaggtgtggtggctcacacctgtaatccccgtacttcgggagacctaaggcaggcagattgcttgaggccaggggttcaagacggggccagccaggcctatgtatcaaaaccgcatctctactaaaaatacaagttagccaggcgtggtggcacatgcctgcagtcccagctactcgggaggctgaggcaggagaatcggttgaacctgggagacacagattgcagtgagccgagattgcgccattgtactccagcctgggtgacagagaagactccatctcaaaaaaaaaaaaaaaaaaaaaaagaacatatagataaattagggagataaatttttcattttaaaatgttcttataagtattatatagtaaataagatttaagttgtatgtgtatataccagcacacctgttttgcaccaagtgagacttgacccttgcatattttcatcataaagggagcctttacccctagttaagctgatttactttcctatgcactccagctgaaggaagcatgcgtaacacgtacatgttacagtcctaccgacgcccacgtctccctagcacacacaggtttcccctcccctatttcactgtttggccggtagaacatttattttcaaaagtgatctaaagtgaaaactttgatttaagcctcaaattctctgagatgccttggaggtccctcagtgttcatgaatattgtcccaaggagttccacaaacagagtaaccagtttaatttaactgagcatctgccaaaccagtttggttgtggaaattttcctttccttgccaccattaataccccacaagcataattttgaaactgctttattagctaggcacagtggcttacacctgtaatcccagcactttgggaggctgaattgggaggatcgcttgatcccaggagtttgacagcagcctaggcaacatagtgagaccccatctctagtagtaataagagaacaaaatgctttattggagcatcatttgaggtgcttaatgggtaactacctcaaaggacctctagaggttttgctaacaaaggaaacttctcagtccacatgagtggatcactttggtggcctcactcatttggtggtggtggcaacaagatgcacaatgacaatttgaaatttttatataaggttacatttatattttgctgcccatcctgtgaagaaataaatgtttcatgaatgggagcgtagaactattttgtgtttgtcatgcctcgttcctttggtttggtggtgggaaaaatttaattgtcaatgacacatttttgtcaaatgatctcggaagaccaggttcaacatgaacatggtctggtgacagcaattgaaagtgagtgttccttttacagacatcactgtggaaccttgaagaagttctggatatgctcagtgagctgcaaaatacagagcgataaaattgattcaagtcacctgttaggaaaattaaagcaatttgtatttttgtatgtaaagcaatttatattttacagtgtatgtacacatacactgagttaatacacaactcttatttccctagtatgaattgcatacagaagaaaaatagcaaaggaagaccatgcagtaaagatagaggagagataaaaccaccctaatccctttttccctaattattacatgtttcagggatcatttaggctggtattgtccaatcctttggccaccagtccccatgtggctatttacatttaaattcaaattaactgaaaagtaaatttaaaaatcagttcattgcactagttacctttcaagagttcaatagtcatttactagaagtagctactctgttggacagcacagatatagaacattcatctccaagtggtctactgcacagcaatgagaccactgatcaaggtttaaaatctctccgctggctctggagagttaaggaaattgtgatcttaaccctggaatcaggaatgctcacaagcaaatttctagataataaagtcataaataatatcagaatattgacgacttgtgcccgtcttgtctggaaacacacattttctgtaactggccaagtcatatgcaaacagagtagaggtcattttgagaccttcatagatgaccacatttgctgtgcagcggaatcccaggtgtacacacctgcatttgatgtttctactatacataacctactagtcagtgtggttcatttagttgtttgcaccgcagcaattcttcccatttatcggactcgctgccttcttccattgactgaaactaaggcagaaggtggaggatatgcaaagttcaaaccaagaggcttgcaaataggatgttgctagacatctttggtgggaccaaattcagtcaccaaatcatgattcacatggcatctgattgctgcaaatactttttcttgttccagagagaaacacattcataccacacacattctctccactcaaaactttaagcctgttgcagctaatgtcttctggaaatcagctagccagttctagcccctccctacctcattaagtttaatgtatgtacctgcacacctgtatctttctgtgaactttatgaaagccaagaagatgaacaagctatatagaaaaatggctccataaacctggtgacccaatttctctttagtccgtcactctgttgaactcagtgctgttataactgctttggttttataactcctcagcacatttaatgagttccccattcctaattggagaacatagtatttggaacaccaggtggcatctggctaagacctctttttgttgtggttaacttccattacctctttaagggaaacaaaaaaaaaaaaaactggttctaaattattggtgattatgtggcaggatgttttggatgtgtcttctccaggactgatccaaagaataaactttaaaagataaactcgtttctttgaattgctgtgcaaatgatagcatatttactctgaaagttaactgtgcaggaaagaggcagaaagaaattgagacccgtgtacctacatcttgaaagaggctttttgtagcttccctgcttcatctatgtcttatcgtatttagtttcatgaagccaaatgccatgaacctacctttccctctcatgattctgctgttgtataccttctcacacactactttgtcctgagttgcccctttatggtgatggtgaggacacttacctcagaggattatgggactgtgtgttctaattagaacctgaatggtcctgtgttatcagcggacactggatcctgtttaactgtgctgagttcattgtacactggttgatgtatcattgtggtccactgagcaagaagctctgttatattcacagtttgatcatcaacgctccactgaacacaattccttttgaatatgcctatttgctcgtcctctttgcttaattgaacaattgcaattactggtacatacaactaaatgttaattattttttcttttcagattttttctgttaatgattttatttacaaattagaagactatcatattttccacaccaaacaaattctccgtctgaagcagcatgatacataaccatgtgatatctttggccaaaaagaaatgttcagtcatttttgtaataattgtgtaacatttagacagctacagacattcttcaataacattagtggtttaacaaccagataggtaagagattactaataaactttcaatcaaagggtgatttaataaatataaaagacaggaaagcattcactttataagaaaataagaactgtttgaataaaatttaagttaatatctgataaaggtaaagcagaaacaattttgaaaatctggaaagttcagcaaagtataaagagtatttaaataattccccataatcctctccaccccaagacaatcgccattaacatttaggtacattttcttccaagggcctctaggctcttcttttgggatgtgcttatgaccgctaacctttaacatccagctggggttggtattccaccccttgtttctccagggtgtttttgtattttcgctttgatactaagctttcattaacctcaactttagctcagtagatttgggtaacagctgctctggtgtggtcttgccactgggcatccctgcattgggctccgctacattcctgagtcacatttctccttgtgttttagggtggttatgctgcataccgctacgcccagcctacccctgccactgccgctgcctacagtgacaggtaagggtcatccttcttgtgcttgacaactacttgtaaattaacttagttgatgggagaggagattcttgtatggtcttggtgaaactgcatgactgctgggggaggtagcaccccaaaagttaggtcccatggtgaacgtgaactcaagtccccatagagagagggcaaatgcttcagccaattctaaactactctctctgctgagacacaaagaaaatgatagccttggtccttgtgtagtttttcacatctcttaatttctgtgacaacgcaccttgctcacatacacatacacacacacacacacacacacacacaccgtacaaccttcttatggtcttccacataagaccacggtttcatctaactcataggaagaaaaacagaccatgatcctacaaggtttacttcaatttcaagcccctttcctttttacaaggtcttatacccaataaatcattccctccattgcattattacaattctaaataaaggagagggagagtgtccctggcattcataaggagattgattctttctagcaatgcccagtgtccaatcctacaaacataagccagcttttatttgtaatgtacaccacatgttaaggcaggcagtggaaggaacacagtgtgtttgaggaatgcagaagtcagaatggatgggcaggttgcgggggtggggtggaaatcaggggtttctatcacccaggctgaacagatgagttggttcctgaaacagcaagccgtagctacttttgtatggttgccttgaaaaggaaagtgtgtgttttcatattgaatgcaactccttggctctgttttctgaggacataaatgtgaatgttcagatgctctgcatgcacaaatgtcattgagggtgcttattttggtaatgagtcctttattttaaaaatatgtttcacgaataaaacaatgataacaatttgcatgtgtggctggggcatgctgggtcagacaggtaagcaggcgatgtatttgactcctgaatgggaagcgtcagcagcctctggtcctcctacctggcctgttgtgatgtagttcctacctcggtttgctgtggtgtgctttctctgcagttccattccatttctcacgagacgtggtgttagctaattgtagctacagaattcttgcaatataataaagcagaataaatccctgaatcctaaaagctgcattttgaaaaccccatgcatacacttgtaacaaatggctctttggcaagatggagttgagatctgctatctggttctatgcaggtatcattttcttataagcagccataacaagttctcaaggctgtagggggccttcagagaaatccagacaattgtcaagacaaggttctcaatacataaattatacatttaccgagtaatcagttgccaagatgcaaaatgtgtttcatgtaagttgttatctccaacacactttgacactggattaggaaagtagagagggtcaataagactaataaaaatgatgacaatcttgaaatactcaagatcattctacaaaggaaaaggcctaatgttattaaattctgcactgaagcttcacaaagtatcaattgtaatgtggttcagctgcaacccttaattattttttatgaaaatatctctagatgctaaattctcaaacacccactttgtatataattataatcatagtaactctagcctgctgtataattataagaatcttaaacagatttgatttatcttgcttttcagtataagtgcatctatccccaagttgaaaaaaaaagattacaaagatatgatttaaatggactccttcaataagactggtctagacatttaaacaattaacaatatttaatgctattagaattacctgagattctggccatccctacttgcattcatctaaacatttttaaatttctgcattttggaacaccatacatgtaaaatctgttattttgatattattcagatttctcattggcaacatgtcccactgaaagattgcccttgttcttggattggtgaatctttaataactgcaattccaactttagtaccatagtttcagttgaagaaaccaactaactaatactgttgtccatataattggcctcttgttgttcattagagaaatttgcacatttggtcttcttggttgctgtggaaattgataactattcctatttaactttatcataagcaagacacttgccacatggtattattcattgaagtaaattaattaataagtaaatggacagaaagcaatctttaaagttgtatttctgatgttttaaaatgtctattaaatggtgctacttccttttatctgtaataagcagatattgagaaagaatacctttttatagaagacacgtttaggggaaaatgtgaaattatcagaatagcttttgaatctagattaaagatgccaagtacctataatttctctcagaagtagcaattgtgtaaccaattatttttatatcatcacagcatagaatcagtaagtgatggaagcttagttcctcttctgtagaagacaggcaagataaagaaaaacttaacagaaaaacttcgtccaaaataggaagtaaaatcagcaggcattgagaatgttttggtaatgctcactggttgtcagttgatcaaaagagaaacagcaacaaactttccctgtaatcatgagattcactcttcagacatcttgaaagcaaaagaagtttgatgtccccagttggtaggattttaccttttttcagcacaaattaagccctcatcaaatgaaagattcagggatctttgaaaaatattgaactccagtaacctcaggactgtccagaaggtccttaatgggcaccttgcaactccctgcccatcatcttcttggttaaatgatcacatgctgattatctcggagcaacctgagagtctctgaatgttgacctccagaaagaagaccatctggtgtgggcagagatttccccaaaagaaaaatacctgactggactaggtaattttatagtctcattgacaaatttaatgggaataggtgaacatcttttcttggcatttaggaaacatttggcaaagcacttgaccttcaccaaatctttatttctaatctcactttgatttatgcaaagccaactgtctgaactttcaaaggagagcgtttcctgagcttgaaccaactgaagcatggcagaggggcctttggtcatccggtcattgcatgccacttggtgttgctgatgtgtctgtgatacgttctggattggacaggtccatcacatcagcttgatgaatggcttgcttgaattaagcctgggggcaggcttctctttattgattggctcatggtttgtgtattatgacttggttgttgttgcatcttgaagcagccaaactgggaggtgcggagggggtggaaaagattccctgtttgatcaactgtgccacaaatatttgggaaaatgtgatgtgtacatggctttgatgaaagtgttatctccccagacagacagacatttgtcatgcttgtcctgcttgctaacactcttaacatttcctaatgatcagtgcatgaaaatgtccctccacgtcagggctgaaagtagctagatgcagaccgcctagagacggaagcaagacagtttttcactcagatttcatcacagtccaattacactgatagttaccaggggccatttcttccacataaaacatgcatttcttgtaaagatccatgaaagccaagaagcttttgacattaattgcggcaccaggccacacaggtatctctaaactgagcaaaagatggcaaccaacataattttgttttaatgtatacctttttggattctgaggccttaaagtttcactgctaatgtagagttagaaattgctacttttgtgtgacaaaaatgacatattggctctgttgtaatatgaaaatatacatatatctacataaatgttacgtagctcaacttaatagaaatccaaataaaatgccatattatcttcctctctgcacacacacacgtacacacacacacactcacttgtgccttggggcctcacaagggacttataagtgttttcaggtaaagcttaatgcaaagagaccagggcttgttaatttcaagtggtcacaaactacatgctagagaacgtaagttaaatatgacattcataacctatgaataaaaggttctatttcagagacagatttgtgtttcttagaacctagtaaggataagtaggcatattttcaggttcatagaggatttagtcttattttaaaattatttaagtgacagagatagacatatacatacatccatgcttacacatacatagatgggtgaaggatgggtagatggatagatggagataaatcgatacataggtgggtggatgaatggaaaaagagggaaggaagcaaggaagggaccatctttctgccctctaatatttcatcataagctaaatacagaaaataggactaaatccttatgcacaaaagattgtacaagctgaactaaaaaagtaaaaggatttgagttgatttccattagcgcaggctacttcctgtctattttagaatttttctggcctcagattaagtagtagagaaaggctgtcatgaaaatagacaggcaaataagtatatttacagtgatattccattttaattggagttcttatccgatgatatatactaaaaattaaggaattgtcagcatataaagtatatgagcatcctgaatagaaaatttaatttaccatttaagggcttatttttgtaggaaggttaattttttaagaagatgttgtattttatggacattatgttttcattttttttttcccatgggataggatatagtttaacctgtggataatttggaacccttaatgaaagtacacatgcaaagcagacaaagggggcacttgctttgctttccccagtcctcttatctgaaccaagtttgatagggattgaaaatatttctagctaaacagcagtagcagcccttgttcttattctttgtgatgtgtggcaaggagagatctcaagatcttattctagtgccgtattgaaagcagtatctcccaaggccagttcaagacctggcacctgcctttgatggcatatttacggtttatcaaaacggaagaacaccaaccatgtaatatggttgtcaaccctcttttctgggaaataggctgtatctattcttccttctcacatgctgtttaaaaagatttataaaattagaacaatagcaaacggtagttttagacatccaattttgtttttcatgttcttccttggcaaagtaaacattggcaactttatgctagactctgtatcattttatttacatttgcagtctctgagaaatctgttggaaaaatatagtgagagcattgtaaaacatggccatgccagagatggtattctcagatcaacaaggaactgaggatggagttcttgggggttcagaagggatgggagagttttccatgccatcttcccagctgggatacagacccaaaggcagagagaagccacttgcaagtttgagtctaggctgtggaatcaatacgtggcaaataagccaaagtcatatctctgtgccatttttgatggtgctttgaagaagctgttcttggttttagttttttttttttttaatcttttatttttactcaacctgatgaactctcttgggttctataattttttttaaaaaaaagatgatctgtcaagttgtaataagaatgtagcagaaatgagtcactcatgcctttatttacatcctcctgtgcccctgtgtctagaaaagcacgtccaggttttagttagaactccaggttgagcacgtgtacatctatacatatctacatgtataaacacacactttttcttgttcatttaaagtttactttcctaacagatccattttgttgttgttgttttttggggtttttgcctattcagactctccttaggaagaaaaagtgaaagcaattgtcctagacagctttcgggtaactagaaacacacagttatacctgtgagattcctattacaaagcacacatgccagataaatttcttaatacttctatgtgtgtgtgtgtgtatatatatatatatatatatataaaacagtgctcctcttaaagtgatgttgattgtatattctccaaaaaattaggataactaagataattctatttcctcctgatctgctctgtagactgtcactgatgtatggagatggctctgaaatagtgaggaagggaaggtacatctcagcttttgatagtagagtcaccgtaattttttaaaattgggtttatgcatgtcaagctctcagtactgagaagtaatatggctgtaactgatagatatatttcctgagtttctcttagtttatagaaatcacacacacacagagacagacagacagacacacacacgttaaaagaaaatgtgttcaactttctctctcaagaactaattgcctttggtccataatctataatggcttcataacaactgttatgcactattggatgaatatgtaattgaatcagtttaaaaaaagaaccaatcctgtaacagtcaacagactggaccaccaaggagttggggagagattaaaggaatttccaagcccaacagaccgtagctgtcacagccacgtgggtagacacttttgccagtgacaaggcaaggtgtaacaactcctttggtcatgtcatggcctaattacacactttttaggtcgcagatcattgacttgataggccacaaaaaaggaaataaagcctgtcttttcagtagcagcatcagaacccttcagctgtgaagggtttagaggcaggttgggaaagcctaatgctttctaggtgtagctctgttgagaatatacgtgcaaagccctatgaatgagccatttctattgctaaaaaaaaacctgcattctagaagacagtaatccagtaaagcagaagatagaatatcttagctcatgcagcatttgtggatgtggcaataaaaattaaaccgctccactttgttacgttgttctttgtttgggttttatgtcactaggtagtatactatggatggtagtatactatctttcaagataagatgaaatttttcagtaaaagtgtctaatatttcattttaagttatcaaagcaagttctgactctgtacttaccacaagttgaaattcttttccagaagaactgatttctatttcaatgtggcctctaatttatttccacttttgtgtgtagtacatgcatgtaagcagtcaccagacagaaatgacttatggcttccttggtgtaaatcacaatgcttggttcctgtggaattaggcacttctcaaaaactatgatgaatttcatatttaattaacatatgaaacatttagaataggggccactattggaatttgaggggatgggagtctgtggggcaaaaactagggagaatagaaggagtaactagtcacttttctttttttccaagctaattattgatacattatgatgtgtgactgttcaaatagattaacagatttctgaaagctgaaacataatcaaagccaaatattctcgtaattatcccaatcatttagattgaaatgctttggcctgagattatagaaatatgccacacatatgataagctaaatcagtggttctaacgggtcttggggacctggaatttaaagaaaaaaaaaaacatgattgttagatgcttctaacatcctctcaattcttgcctttcatggtttcaattttgtaatttaaaattttagaatgtattaagagatgaagaacttgttttttccaccatttctgctttgttagagtgtttgtggatgactactaccaaacagaatatgagcccaggtagtgggagtggaggcactttaataattcttcctggacaataccagcttccctgttttttcagaatgatcgtttccccactatttttgttttcttccatttctgtctcccaaacttagaaaatgaacaaatgggggaaaaggaggattaacttgttctgttttgaaatttcaagatttgagtggatcatctaaaaagcctgcagagccttgccttgtaaagtgtagtttccagaccaacaccattgggctcaccaggagcctgtgagaatgtagaatcccaaaccccagtcccagccgtgctgaaccagaagctgcacttcccagactccagaatgactagtgaagtttgagaagccccactttagagaacaagcttctgttctaccccgatatgccataatgttgacaaagggttgtcctgccacaaaccttgcaagagataagaggatctatctttataaattattgacttttattaccattgcctctctactctcccttcttcaatgagagagtaagaactatcaacagctgagtgacttcttccctctcctggcccagggccacaattaattctttaccccaaaagatccgtggacggaaacagttatttatgctaacatcgtgtcattaattgcatagattcacgctaatataaaggagtacctgaaaaagttccatctgatttcactttactgaccctcagttttttcctatgctaagtggaaagcatggtactaattagaatcagaaagagatgaagaaggtgaacattataaactgaaagaggtggtgcaaatgttatcaataactcggtttcagattgacatattttggaatgtatgctagtatttgcagtgaatatatagaggcagtagcaagtacattaaattaaatgcatttaaaaatgtaaggttatttttagtctaggcaatctctaagacacactgtaacactaaccctctgggaacctgtgccttgcttagcatcccaggtcttgtaggtaactgtgtcaagatttgaaatcagatcttttattctcattggacctactctgatatagacatgcactagcaaatcattgctgttgatacagagaataggattacagattgagatttacacgtgggtcctgaatctctgtgaggttacttactacacgagataatttgggcaggccaacattgagctagttgaccctcaactgcctcatctataaagtgggattaatggatgaccattgcttctttgcgtggttgtgagaatccattgctgtcatgaacagaaagcccctctaagagatcctgacacttagttctcaggatattagcagcagcagcatcactgaactgtgggattatcgtgttctgttctcgagtgaaaaaaaaaacaaggagtttcctgtggaaacgggttttatgagttagaataatttttgactaaatacatttgtttttggttgttttaaaatcttgacttctaccctagaaatataaacataggttggggaatagaaattgggaaccgcaagatcaaatatcctatccttctttttcaacctgtgccttggatatttgttatcttttctgctcatggatcagcttaggccaccacacatgcattagctttgtagaagaaatgcccaatctcccagtataaacccagccttcgaactatcaccgctttggatttttgtaaaaccaattgcctgccctcttctttgggtggagagagaaagagactttcctttaggagtctacacagacaaaaaaagaaaaagccaatttttctaccaataaaatgacttcacatttgtttctcattcaacttgcacaaaaggtctgggaagggcatgtactgtttttatatctcaatttttccaaatgaagaaactgaggtccagacaggtgaaatgaattttctattggaatacagcttatatgcaacaaagcatggttttcagattcacggttggttctctttcacctgagcctagacaagaagtgcagtgggaactggggagaatgttaaatgttggaggaactaaaatgacaaaagggaactgttcaaggtctccaagtaatggagatgaacttgggtttgaatttccaaaactcagatctttttttggtagaatagccaaactggggagagattcacagaccttatcttctttctgtttaagcttctttacgaatatcatgttagcaataggaactgtgtctaaatgaaatgtttttaagtgtattttcatgtgttcccccttttcaaaaagagataggtgtaggacctttgagagctttctataatcaatctgtttggttacttgtctgtgtataccctgtctcattctacaatttgccacagtgtattgaagtacacgtgacaacactaaactgaataaaagtgacagggcaggtaaaaaatatgaatctgaatgggatttgtaccattctggagtagagtattagtattttatgtggaaaggaggtaaaatactgattgcaaggaacctccctttgaaggtgataaaactgaaatataaattagattatgagcttccagacaggcaagtccaagatactccagtgatttaaaggatatgagcatagcatcagaccccttagacttagctcagtgcctgatatgtagcaagcccctcatttacaatctgagggctgaatgatgtgagtcaactctttggtaagatcagcaatatgaattttaataggtacatcctatctgcatattatgtttaatattcagaaaacactcatggctgagttccatatggcacgtctagcaattttaacaacaagaataaactgattattgtgactttccaccttaattttacatgtaaaaaaggaagcaacctggtaagcatgattataagacaattactaattataactactgtaattagtataattagcaattaaaatattaagtataaaatgttaaaaatcaacactagtgcaatttaaacccaaaagacacaactgtttcctgaagaggcaagatacatatgttcagagaggtattcatacagtgagatgagttctccgtgctggctgacagatgagaatcaaccccaggggtttttcaggcatatctgtacatgggaaccactctcaaagatgctcaagttaaatgaccggggtgtgggcctggtcattggtattttatttaaaaaacaatcctagctgaatatttattaaaaaacaaagtattggctgggcagtcagggctaaaaacctctgccttataaacaacagatatcccaatacgtacaggtagaattggattttgtcccactgctatcctggggcatcttggctgccatctaccaggccagaagaccaacttctcagctgtagggattgcctagtaggcatccttggcaggtttaaatgtgtgtgtgtgtgtgtgtgtgtgtgtgtgtgtgtgtgtgagagagagagagagagagagagattcaatattcatagcattggatacaagaagaatcttgctatgagtgatatcgatcctgagatatatttaacaatagcaatgtaacagaattaagaagccaaataatgagaagtgagcagaatctttgcccataagacttaaagacagtattatttgctatggggaatgtttacgtcccacctgcccgcaccaaaagttttctctgacttgatatctagcatctcatgtcccctccagcaacacaggctggctactgttttaatttaactctgagaattcagctgtgggtaatttttcagaaggaaaactgccaagagatgagatttaacctaaggaacaaaagtgggctatgagggtgatatgcggcaatccacaggactaatttaagtgtaccaccagctgaggcagatagagtatagatggttgatctataaaaccatcttaaaagattagtcaggctagtgacataagagtgaaagagacagaccatggcatatgccatttcataatcaagttgttgttagaatatgtttttaattctttctctcaattattctcaaagaggagttcaaatatttcttagaggaaatgaagattcagaatgttaagttactccacagagacatcacacctcactgctgattaaataccccctacgtgaatgttccaagcagaaccttagatagtaaaagcttggtcttgagccaagccaactgtgttcaggtttcacctctaccacttaacagctgctcgcattatgtaacttttccatgcctcagtttcgtcatctacaagacgaggataaaaagaagggttataagaaaaattaaatgaatacataggtatgacacttggcaacttgcagtcataagtgccccatcagtgttagatagtagccgttgcaatcaacattcccatgagccaagacaaacacagccttctcccttaaactcaatttggccatttcatcatttttcatacattggtaatccttcctcttctccacccccaaccaagccttcccagttcaaaataatcttcctgggacaggtgagctttgaagtgaaaatgggaatgaacttgcagatttttcagcaaggttgcccaaacttcaaggtaagaagcagcaggaggcgtgattccctcacagcagaatctgctacctacagaacagtgaaaatgagtgcctgtggagctgatcaacaggcaggcctgagttcttattaagtgtatagattaccagacctctctcctggaaattctgattcaggtggtcagagttgaaacccaggaatctataccttgaatgagcactctaggcattcttatcttcagggaagttggagaaattttggagtggaagagaggtagaatatagaaaagttgtgggtgacaggaatgggaaaatacagaagtaggggccaactcaaagaaaaatggaaaaacccaagcaaggatgatcttgagtaaatgcataagaagtggtccattaagaggaacaggtaaggaagaactcaaataccaagagtatgatatggccactgtagagcagtttctctttcaggatgaggtttaaagtcaactcttagaaggcatctagaaactagaagtaccctttcttggatactgtatcaggtttgtgtggttgcatagtctaaaacctaagtagctaggttgccctggaggcaagcatggtggccaaacagaagctgcaaaagtagaaaccaaagttggaagagattcagtgattcaactcccttgaatcccttccttgaatccacttccttgaatctcttgaatccctctgccttggtgccataacactgcttctcagctgggccacatattagagtcacctatagagcattttccgaactactttccaggccctaccccagatcaattaaagcagaaacctcaggaatgggccctatcactggcactctcttaacctctatgaatctaaggagcagccaaggtgaggaccattcacctcaacaagtgattttcaaacgaagaacgttagcacattagaatcacttggaagcatttaaaaactgctgaggcccgagacccagtttcagaggttaccatttaattggtcttcagtgtagcttggtaaccagaaatttttagaagtgcaccaattatttacaatgtgcagccaaggttgagaacgactcagccagacttgttttatgaacaactaaggaacagaccagtttgtggaaaatcaggtgcattttgaagtttaaattcacgggtctgtgttgagagaaagcagcacactagggtttgcataaggagacagaccctggtaccagccttctttcttctcctgagaggcagccccactgtccagaatatacctgcattgttctgatcttttaatttttctgaagttgtttggatatagcggagacattcgtctctttgatcatatgtgtctctggtcatctggggcaaatggcttgagagagggtcatagatgatccatttatgggccctctaaatcaatagtcttaatgttcaaggtgaaacagctgtacataaaatggcataacatggtgaatatagacagcaacatgcaatctccccttagaactgtaccagaattcttctgttgtcctgacactgcaggccaccaaagccaatctgattttacagacatttcctgttaattgcacttaccgattgatgaaagcattgttcagggaagtagtgatcacacagattgaattcatggaattaattaatgaactctatagaaaggcactttctgacaccttatggtgacctttctgggatgtagtgggattgtttatgtggattaaaaaataaaatagtacagaatggatacgtcaaaaaaatacttaactggtagctgttaactccttttaaatgtcactattattgagaactctgccttgaaacagatgtgaatttgtagtcagaagtaatctaagccaactcttttgaagagggtgagttgtcaaagggagtagtcccttttgttctgaaacttagggatcaagaagagaccaggggtaaaaaataaaataaaaatcaatacacataggttttcaaaaaaaaaaagtgggggagagaaagaatgaagggaaaatgaaaggagagaaagaacggaaagaaaacggaaaggaaaggagaaaaggaaggaaagggtaggagaggaaaagaggaagaaaggaggaaggaaaaagggtagtttaaggttaagtgcagactcaaaaagaatactttcaaggacaccatcatactataaaattctgaaacaatttttaaaaacaagcctagtttcttagagggctgtttctattcatacttgtaggttgcattttaaaagttacctattcgttcagtcacaattttacatctgtttttgtctccaagtggctttcctgatgtctagcacattggacagttccttagggaaaattgcagaaagggaacacaagctagcaatctgttctaggattaggcagtagaaattgggtagagctgccccaccctcctgccatagatatgtgaatgcctagtgcaaagaccttgccgctttggataaatcatgtcgccattcttgcttacggtagcattcttaggagcattctgtaaatagaggttattctaagtgcctgttttgtgcagcccagaatatcatacctgtagttaggaattcccgtgttattgccccttctataagtcaaaggtgagtaagtcaaatattcaaccaaaatatctcctttgttttcagggataaattttattgctcctctaacatagggaatctggggccagatattcatgcggctcaaaaagtctgtgtcaaaaagcccaaaatcttatgttaacttttattgtcttaaggaaagtgataaacttagttgtgacttgttatgtaggagaaaagtactaaaaatattattctcaaagcatgtataacttgtttatattttattggtgtagaaatgactagaatttaactgaatgtgaaattctagggaatattcaaatggcagctctatttatattccagggtgtacctcttgcaacagtaaaactttcttaagatgttttaagaaatgctccatcactagataccttttgaagcactgaaacatttgaacaaaaccaatcatactaagaagaaaaatgcatttatcttggttcttggtgatccataagcataataaaaatctaaccgatgaaaacccagagcccctgtactgctacttttgaggcatttacgaacctagccaacctcattgtgccatttttataatttgactcagacgatcttatttgtagacgaattagtacctctgaattagaacacataatatcgtggaagtgtcacagttggaaacgtcttaagagagttttatcatctttctgggtttactaaaagtaaaatagcattttctattttcattatttttaatactgcatcattaaaaataattagggtttatttcaattgacaagttctcttagctctatgtagcaagctgggtttgatgaggaaattattatccataacacatcaccatataaaattgtcttctgaaatgacagcactttttcttatttttttttgatattataagtctagaattttataatttttctagctagctgtagtataccctatttcttaatcattagtcccattttaaaaagtaatctctttagcatagaaagtcatatgagcacaatttgaaatgctttagccttagaaacatatcctggcatgttttggtaacacatagtattaatatttggtgcaacagcttgtacatagttcgtattctgacattaccatgactttaagaggtccccgcatgcttatttcatgatctttctaaactctgaggtacatcagcacatttcctcgcaacatccattcacacgcagcacccttccctcccctcatctgtacacatcgaagcaattggcagagagcacatttccccctgagcgagcagtattgtgaattttatcttctcttccagaaatcagttcgtcttcgttgcagcagatgaaatttcttgtaacacctctgcaggtaacaaacgttgctacttcttgatgcatccatccaagtctcagtatccttttttttttttttttttcttcttcacatgctgcagttggtcactctagaaagtttagttaagaaaaaaaaaaaagatcttatatctttggagtacagctgaagccttgaggctctgccatataagacgacattaggcattttgctaactttgatgttttatttctggttttaataatacatggtccagaaaagtaagagtatgttgaatgaatccacaagaaaatcttacagtataatcagtgctcttatggtaaaatagggaacaggaagattaggtacacagacgtatgacttccatgttttttgacgtgttatgtctgggttcatagagactgatgtgtgaattatttgggatctttatggaatattagaggctgtaaaagactgaatctataaagcttagaggcattcgagaatataattatctctgtcttataagaaggggatcttcattctattagccaaagatcctctatttcctttcttataaaacatctctcaagtagcaggacttagagagaccaggtcttttggttttgaaaccaggacattggcaaatggaaattgcatagctgcatgatacgtccatcaaaataacacctgtcttttttctttgatgtggttcagaacagttaaatttgtactttgattagtatggagttaattaaatgccaagataggtgaatgccttaacactagatttccttctttttccttttgtcgtttttaagcctaaactatgaccaaaacaatcactaggaagtcttgccaatgtgttgctttcagcctgcgagggaggacgttacaacttatcactacataactgagcatcccatgaccttcagacacatacattaaactgaaccttacaaataaacactcatctgttaccttttatcaatgctgcagtaaaaaaaggcttatgtgccaatgtttcactccctatttactgcctttggtgagaatgaatgaatgaaaggaaggacagagagctaggaacatgcacccaactatctctgttctaaaaggcagggtcagttttatttatatggtcagcctcaaccttcataacgggttaaagtcttacctggtgagttcaagaggtatgcatgatgcatgctgacattttaaaacaatggtatactctttctataaaacctctttgctgatggtcctgcaatttccctcttaacccctagactcgtatctctgcttctcattgtgagaggtggcgacatccttaacactttactaatgcccagtgctaggtgcaatggttaattgaattgctgggagtggcagggaatgttcctgcaatacaaaagttgtttaacattttcagagccttagtggaatggagcatgaaacaaaaggggagaccgcttggaatgggaggtaggggtggggaataatgttaatttaaaatgttcataggcctcatgtatagatgcctcagtgcactagagcttctgccttctgttaacccctgtgcatgttccagtatgttaggttatatttggacatcttagatcaaacatgaaaaagatattgattttgccccgtgacttaaaccctgccttataagcaagtgatccacacacaatatttctaagaaaggcgacagaaaatgaaagtttgcatgcgtgtggtgagtgtttccatctacctaatctagatggctgctcagtaaattcttaatgaattgctattgatcacatttcagattgagagagatatccctagtcctttgatggccattttaatattatgttgcatgcttcataaggttccgtttgaactctgaattttgaatgaagcatgaaaaaggagacacccatatccatcaaatgtcagattatctcccagcaagttcaccttgctcatagagcgaaaatgaaaaatcaaaactgctcagtcaacaaaggttgtaactcgtggtttcagtgaaagccttctagggcatcatctcctacatgctgaaaaaacctgctttgggaggccaaggtgggtggatcatgagggtcaggagtctaagaccagcctggccaacatggtgaaaccccatctctactaaaaatacaaaaattagccgggtgtggtggcacatgcctgtaatcccaactactcaggagactgaggcagagaattgcttgaactggggaggcggaggttgcagtgagcagagactgcgccactgcactccggcctggacgacagagcaagcctccatcaaaaaaaaaaaaaaaaaaaaaaatcctgctgtgcccactacccacattctaaacagcactactgtaatgagctctcacctccttataaaaacatttattagagcaggtgtattgaatcctgctatctactggatatcagagtttgacaaaagacaagttctctatttttaaatggagaaaaaaaaatcaacatgcttaaaatctcagtgtggggtttgatggatgttataactgaaattcttataaagaggtgctattgtcacattgatgcccatggtggatgggctaagcataggcagccatcaggggcttcgggtggagatagtgagatgaaaatcattaagcagtagaacagcagcatttcaggatttgttcttcacgtttcccaaagaaaagcaatgccttttacgtgggtcttgtgtcgagagtgccaacacatctggtctgctttttctagccacatggaataggcatttttcattaacatttgtggtctgtgagactaatttacaaggatatctattttcttacctaggagtttcaacaatgctattagttgtgttgttttgttttggtttttcccaaagaatgtgtgctctgttgggtatcacttgggactaggcttttataacagggcaggacacctcctaatgcatccagcttggacaactgagtaggtcctcattcagtaacatcaagaacctttgatgagttggattcttcaatagatggtgaaaagggagtaaatgattttcccttcttagacgggaggtctccgtctgtgattcattaggaattttccagggtgggctagtgattgtagtagttgcagaagaagggtctggtatgagaatggaggttgaaaagcaagttacttaatcagtgactagaaattcattttagtcgattaatatctctagtcctttgtgggtgtcaggaactgttctaagccctggggacatagcattaaatgagtcaggagaaggtctcatcaaaagaccttcatggtatgggagaacagatcccaaagcacgtatatgaataagcagataatatatatgcatagtaagttatgtacttactgtaatgaatcaaaaagcaggggaggggatggaaagtaaggtgcaatgctattttagactcagccatcagagaaggcctgtctgagggggtaacatttgagcagggatctaaatataaagtgaacgtgtgacccatgaaacatacagcaggtgcagagaccctgtggttgagacatacttgaggtgtccaggagtaagacatccagtgtggcccacggatatgagtacaggtgagtttaatagataacatctaggaggtagacaggggtcagaggaagttaggacttggaggctgcagaacatatttgggattttaacagtgatgcagaggcattggagggagggttgtaatctgactttaatgatcagataagactgctttgtggagaccaaactgccaaagaacagaagaaacagcaccgaagggcaatgggggggcccttacagctgtccagagaggggtgacaatggcttgggttagtggggtggctgtgggtgagaagtggtcatctttaagctgtattttgatgggagaacaaacaggacatactggcagattagaagtgtacaagctcgagtctgttaaatgtccactccccactcttgttctaagggtctatcagttaattccatggagcaccaaggctttaatccctgaggaaagcaaaccctttatccctgtagtaattgtcccttgttgagggctttgctgaactctccaaggtgtaatagtaacttactgtcatttattgagcaaattatgtgtgctagtatgatatacatacatgcatgtatatgtataatgcatgcatatgtatgataaactatatatgcatgtatatatgtatcacagtagttcaacgaggtgttatccccattttggaaagtgaaaaaaacatacactcaggtccagaaacatttagtagcttgcccagtcacactggagtccatctgatgccaaaacccttcccctgggtcacactgcctccacacacacctttttcttcacccttggaactttggccttctcactccagatggaattctaccttccccagtatgctatcttgctcctatgaaactagtattttgagtcggatgacaaagttgttactatttggaagagacccaagggcactgtatgattctttagcagttgttccactggaattttatttaacttggcttgtccccttcaggcagcaggcatatgtttagttccgtgtgctgggagtactggtgtagttgtggggacagagggagcagatgtcaggtcaggaagcatgttgcgtattagggaagagagggttaaacaggccaagtgtgttctaggttaattcaccagacgtctttttgctgaaagttagtggctgaaaaacaattaacaatatgctagtccctgaaaaccccagacaggttgaaacagttgttttagacacagagtccaagagggtgtgtgtgtgtgtgtgtgtgtgtgtgtgtgtataaagggggtaggtggaggctgggactcactagcaggaagatatgccccttccaccatgccaggacccaccatgcattcccttagcaaatctggggacatgttttcatctcagttcctgatgagtatgggacacaaccatgtggggtgagggtagggtctgcaagaaagccttgagcaaatgaacaatctgcaaaagctgttgaaactgttctctgtggggcaggttgctacccaagttaccaattagaagcaagttcaggggtacaaggaggtgtcaccagcgcctttcatttttctatccccacttctcaacctacacatgctgccagctacattaaaactttaggtaatatttaatatttagaagaagtttcccaattggccattcctctaactgatccttcagcaagtctcatctaattgtcttttctgcattttagtgatttgattattcagcaaagttgtcatgcagtaaattgatttgtggctaattggtccatttccaataaagtgtgatatgtattataatagggaaagtacagggagctaaggggccatataagcaaaggaacttaggaaacatactcccacttattgagaaccttctgtatatgaggcatagtctcaggcttgctgcatgcaataacaataccctataaagtgtgtgcaatcaatttgtgaaaattaaagatgtctagatagtctgaattagcctaagtgggaaagtgctgtatccatgcatgcagaattttaaaaaatggaatggtggttatcaaattctagaagaatgcaccaaagtcacctggagaacttgttacaaatgcagagcctgttttgtcgccttcccctgcccctgagattctgattcataagtccggagagggagcctggaaatctgcattctaacaagttgccccagataattgtaatagaaaagacctcacaccttgggacacactaactgatcaatcagggaccttttctctttgagatagggtctctgtcatccaggctggagagttcagtgcaatagcctgatcttagcttcctgtaatcctggacctcctgggatctagcgatcctcccacttcaccctccctagtagctgggagtacaggcaggtgctaccacacccagctgatatcttaattttttgaagaaatggggtcttgttctattgcccaggctgatctcaaactcctggcctcaagccatcctgcccctttggcctaccaaagtcctgcgagtacaggcacgggcccaccacacccagccaacgttttttgtttcaatggtaaaaagagcacacaataggacttgctaaagttgtgttcacatgtggctgtggagcccttgagatgtggccagtccacaccaggatgagttgtaagtaaaaaatgcatgctggatttccaaaacttagtacaaaaatgatgtaaaatatatcaataattgtgagttacacattgtagtgatgacagtttgaatattctggagaaaataaaaatgagttcaccttttttttttactttttaaaatgttactgtaaaatttaaaatgacatatgtcttgcatgtgtggcttttattatgtttctctcaatcccattttagaaccacatttttcatttggctcaaatgaatattgaaagagtttgtgtgtccccaagaactggtcatttggaggtgggggatgttcaccaggagttaaaatgttgtgacagataatctggacattgtcagtgtcttggtattggattttaacgttgcctcctggtgctaggtgggtgtgttggtgctgtagagggacattccttggggttcagggcccagaacctccctacttctcaacctgcttgttttgtcttaatctttgatctgcttgctttgaggatgggagatgccagtacataagactttggatcatcaatccaattcaggggtagctctgacacatgtacccctggggctttaccgggaagctcactgatcccacataaaatagacgagaggcaatagctgcagtcctctcagtcttaataactgtcacttgtttagtccttaactagtaatcataaccctcctctcaccctcactgtagccttgtacgatgaggatgcaccattatcatctccatttatagatggtataaccaactcaaagagaagaactttgagatagcttagcaagaagtaacagtcagtgtttgactctagaaattctgactgagggatccccagctgctgttcaaccctgcttcatggaagggtattgaaaatctcataagggatacaatttgtttttcctcctatggggtaaagtatagctggggtgccatggtgatttcaaagcacaataaaaattcttagtgattttggtagagcaggagtagacaaacaaaggagaaatgaaatttctaagagaaggatggccttgagctctgcattaaagagaatgtgcctacagctccttttttagaggaggtattctagggcaggagaatttcatcaccaaaagtgggacttacttactgtgtcttctctactccgagagtggctgctattctgctttccctcaaatctgctgttgggtttcagaataggaagaggttttcagaataggaagaggttttgaatggcattggtgggctagagaaaagatgatgtgatctgatttgccatgggtaaatggtctgagtcttttagatgccacagtgttggatttgtgtacgtattatgtatgcatagttctgatgtatgacaggtatccatgggcaaaaaaaagcaagttctgtggcttctcatgtagggtctaaaaagctcagatgtgttccctcctacttctcaggggaggcagggaaatcacgaggttgaaaaatgtgctaagtgatttctgaagttaagcgctttaaagacaagctaaggaagtcagcagcaatgaaactcaaacagagccaagtagagatgactccatgttatcttggagcatttcttccacttctagttttatcatttttggagactttgctgcatttttagtcattttgtaggtcaggggtccccaactggacacacagcaggtggtgagcggggtggggggtgagcaacgcttcctgtttgcagccgccccctctcactcacattcctgcctgagctccacctcctgtctgaccagtggcagcattagattctcatgggagcaccaaccctactgtaaactgtgcatgtgaggcatctaggttgcacactccttttgagaatctaatgcctgatgatctgaagtggaacagttttttttcctgaaactattctccacctccctggtctgtggaaaaactgtcttctacaaaactggtccctggtgccaagaaggccagggacttctcctctaggtgtttagggactggtttagttcctccaacttcagtatcttgagaagctttgaggataagtgagcttggtcatccctatggtcaataaatgtataagtcattgctcaaattaaaactaggagaaggctatagtaaccacagaggagtatttccctaaattcactaactgaccaacagatctgaagtccagaactcagttgacccttgtagagtgaaagtgaacaggaacatttcctagataaaccattgctttctgaatttcccaatacatccaagtagttatgttaatgctttcaggagggtttctccctgttgcagcaaaccagggtgcatggcctgaggttctggaaaccctctcaaatctttctgtagggcagaggtggggtggttggcacctgttgtctctccatgtacctgcatagtgcactgagataacttgtcctttccttgaatggctcttctcctgcaagattaaaatcttggccataattaccccaacattttctcaaatggatgcgcactgggattagcccagaccttacaacctgggattctgcgatttgaaaatggagattttggttgtgtggtaaatatttattggcatgaagataagagactgatcatttcagagatatactgaggtgtcctaagctcggaatttttgaaagatcttctgtgaagtcccatattctgggctacatttctttgtcctttgaagtgagcttttgtctccattctgaccccacagaatccccaagaagctgaggggacctctctgcagttgcagaattgccaagagatttgtcagaagccttcagcctctttcagtaggactgtgagatcttactgttttgctgcattttcatttagtgacgagtatgggatggttgagttggaaaacataaatgcccataacagtttatgattgacaacggattcatttatttctagttggatgagagaaggaagtaaagcagtagctggggcagtgctgcagaactcagaagccatgcgccctccccttctggtcttgttctttcttttcctggccaatattggctgtgactcctttccagcccctgagaattgctgaaagccgagcattttgtccaaacacagaacacttggtctggaatgtatgttccagatgcagttcctccggatgggcaaaagcaacaactcattggtaatgataccagcaacaatgcaaaccaaaggattgtcttcaacacatcatttatttttcatttggaaaagtcctcaaaccccaaaaatgagggcaatgaaataggatgaatatctgagtgggatgagaatcacttcttcctgggtgcaggttaccttctgatgtcccccttcttacctggtgccccagagcaccccaaccaggggggtagacagcagaactgctaaatctcatttgaccctatacagggaagtgaaagagaacatccctttagctagaccatggctctctaaagagcatgcttttagaaccactgaaccacagttggtgccctgttgctatgctgtacggtaagtgtgcgacttgcatggattcatttttccaaatacttaagactatgccttagatataaggataaaggaggcactgtagtccctaattgcattgcagagacccgggccattcattgatccctggtgagacatcccattttgaatgcatactctgcagcccttctctgtgttgggaggggtacaagcccatgcattttcttgctgccatttggctgtttaggatgtctttgctaccttctgaacttcatctgagagctgagcagatttcactcatctttctgctccacaggattcacccagctatctctggggtgagaagcatggggagatgatactaatggaagaataaaaagttcccagggcataaacgctcctcatcaaaatagggagtaaaatatagtgaaattaattagtgttcttactgtggccctataagaaaattatgttaaaaccctggtgtggagtaccaacatgggcccattgtatctcattagcatccagcttgtttcaagtaggtgtacatagtacttcttgctaacgtgtctcagtagagttgataaagcactttaacaaacacgggtttatattcccattcaagaggctgcatacttattcattttgctccaacacaaccttaagttcaagtaagtatatccatttgaactacatctgtaactcataaattagatctcaactccaaaagcatctgtaatttgatcggtagagctgcatgtgattatattagaatggaatttttcaattgcctctgcagaccaaaagtctgggcaaggagggagagattggtttgtgaaatacaatctaagaagccatgtatcataatctcctctatctgtaggtggcttaatatttacctggctttcttgaatgcaccttgagttaggtagggctcagtcagaaaactactgctttacaaatgaggaagatgaggctcagagagcatgctctgtccaagtcatgagagcaaggacatcataaaagcagaactcaaacctggatctttttgccccaagtcctgaatctccaagccctcgggttgcttcccagttttaacttgttgctaaaggtcaaaaagatgaggtctcatgatggttgcaagccatggtgaattagccaggaaagcagtcctcttttatatctttgtttagtttttccctgaaggcttttgatgagttttatggcaacttggccagtgttttgcaaactcacagaaatgatgtaaaaagtgtacactatttctagagtccccagaaagttttcttctgtcttgaagcatcctgaatgtgtctgggagcagctgacccagagtcttcaaaaagcgtatctgaatgggatcataattacaggcatgagtgtctctcccaggccccatttctctctttactcctttgtcttgctgcctcctctctacctgcactgttctagacagtggggatgcaatggcagacaaaatagacactgccccagcctccatggagttctcgttccaggagggtgaaaggtaaatgatcaggtggagtgggaaataagattattagagttgctatacaacatgaaggggtagggatgaagttggaaagtgcccttaaaaataagagcagtcaggctgggtgtggtagctcatgtttgtaatcctagcactttgggaggccaaggcaggcagatcacttgaggttatgagtttgagaccagcctgggcaacatggtgaaatgttgtctacaaaatgcaaaatttagccacgtatggtgatgggcgcctgtaatcccagcaactggggaggctgaggcagaatcgcttgaacccagaaggcagaggttagagtgagccgagatcatgtcactgcactccagccgaggtgacagagcaagactctgtctcaaaagaaaaaaaaaaaaaaaaggcagagagccagagaaagaagcatctcttcatctctctagggaagggacatttgatttgaaacataaaagatgaaagtcaggtggagggtgagcaagtgccaagactaagcagagaatggatttgcatgtgtgcaggaacgatcaagaaagcctgtgtgggccgggcatggtggctcatgcgtgtaatcccagcactttgggaggccgaggcaggaggatcacgaggtcaggagatcaaaaccatcgtggctaacacagtgaagccccatatctactaaaaatagaaaaattagctgggtgtggtggcaggtacctgtagtcccagctattcgggaggctgaggcaggagaatggcatgaacttgagggacggagcttgcagtgagccaagattgtgccactgcactccagccttagcaacagagcaagaccaactcaaaaaaatattaaattttttaaaaatcctatgtgcctggagcacagtaaccaagggaaggaagatgaagattgaaagagggacagaggcagcttattcaagtttggattttattctaggatcaatggaaaactattgaagggttttaagcggggagtcataggattagatttatatttaagtggagagatggacagacttgagagatttgatacatgtaaatagctgctggtttgaaggagcaagagttgaaaaaatgagacaagatttatggctgttgagttggtgttgatgaactagtggcatatattagtgtagtcatcatgtgcatggagtaaagtggacacattgaagatttcttccgaaattactgatggatgggaagtgggcacatggagatcatcatgatctgactgcactactgcccactttggccagggatgcatggtgtggaggatgaccatatagctggtcgtgtcctaacatggcgaccgtaagacctcttcccatcattcctgtggacatcctgggtattgctgtgctctgtctccgggctgtgcttagccagctctgaggacatcagattgctgacgtgcttggcatatctgctgcaaacgtagcactcaagtccacatcttccccaataaccttgtgactaaattgtagtgtcacacaagggcgtgttcagaaattagcatttgaaaagaagcctccttgctttcagtttgagctgacatgatctcttttcctctggggaaatgaaatttattaatcataataaaaccattggattctgaaggtagaggtcaccctgaagagaaaaggaggcagctcatttctgaggagtagttcaatgctgctgtattttccttctgccttggaagagaatactgccaaattgttaccttgggttttccacaaaggttgaaactatgcccagcgttatagaatttaccactgaagtatgcagtaggaaaaggtgggagctacgcttttattaaatacattcaaattgcccatatagtgtctccccagaagaggaaattattgccacagtaaaaccatttccccaatttttaaaataatatatctgaatttgcatcttttcacatttgttttgaggtaacaccttgccataacatcacttaacaaactctcaaggatttcagtttgcctctgcacttcatatcctatttatgaaacagctttgccaaatttaagtaccttaaaaataaccctattaacagatttttctctggaccaatcaatcacagacttcattccctcatgaaataaagagcagtaccaaggttatagttttccttttatgcctgttactatgtacttctagttaagtgggtaaaggcccaggtctcaggagtgagctctctgaatatattattattttatcaaaaactttttaacacatctgcccttggaccgatacctgtttttcctcccagaaagaaggataatcgttgattaaaggccatttttgataagaaggactgaagggtgtccccaaagaatgaaaggcaagagggagatgactgtcagtttcactgacagattcacctcagaagagaggcatcccttcaggtccttgtttgaggatcaggagaatcctcttgaagctgaaagcctcatctagattatttgcactcatcaagtgccctttgacacaggcagatgggcttgagagttggaagatgcccagtgcaaacctggtataatcaattgttttattccacctagggtctaacttggagtctgagaaggtccatcatcacgctttcttcaccttctcagactccatggtgtgaggtggtcaaacatgtattggattggtatcacttatctaccaaccatgagaaagcttggaaggaaaatggggggaaaacaggaaaggagagggaaaaggtacgtgcaaattgggctctaagggatgagagacgagctgaaggttgataatacagacaaaccatttcttccaccagccttgttccttcattcaggaaatggtcaaagaatcaaaaaacgatgtcgatcccagtgagtgtctgatgcattcatgccgagctgctgtgaatgttggttgctaacagtacagctgttcccttctccagaaaattgccccatgtcagaggaagccactttaactcaatggtgcatcactcactcctcaggaaagcccacagctaatgccgaaaacttatgtaggcattaaaaagccaacccacttgcctctaggtggaacctgctgtagcatgaaacccataggatcaggtcgcagatattcatctcagacgttgcgttttttttccccttgctctgacctacttgcccctctcttcctcttgaggacaccccattcggtaagtcacttgcacaggaatctattccagtatcagctttcaaggaaggacgtcagcttcagtcagtattaagatagcagcattcaaactatctccaggaaaatatctggcagggcaaacaagtatgggcacaggatacggtggaccaagcacgcaagttgccctaagagattcaagtatcaggctgagtgcagtgactcacgcctgtaatcctaacactgagaggctgaggctggtagactacttgaaccctggagttttgaaccaacctgagtaacatagcaagactttgtctcccccctcataaaaaatcaagatctgccctgtctagttatgcgaccttgagcaagtgacttcacttgattcctttaaaaaaaaaagttaacttccagatatttagtaggcattcagcacgtttggtttccatctcttctccatttttatcctaaagcctataccagaagccatggcaggtagtaggatggtagagagaaaaacacaaagatgagtaaatgtcattaagatttgttgtttcaaatgcctcccccttcccagaacctggccatggattaatgtgacagaagttctggaataataggatcaaaaccaaatcagtctgattgaatgggaatgggaatgggggtcccacagaccctttaaggctgcttccattcaaatatacttgttcctttccattctaagatgctggacactaacttcagacaggttcacttcaccctttctgattcaccctatttcacttgaatggtgacagctgaatcaggagaaaaaggcactctcttgagaattaaaataccctctgtgggtgctgggcttaatacttgaagttgtttctttcttacctacctcagtctctaaggcagctacttgagcagtgtagaaacagtattatggggggaggcagggaaaagcatatgtaagtacgtgtgtatatatgtatttatctgtcaaacatagcaatagcaaccatgttaaatgcacaaaaaatgtatcatgtacagatgaactcttcttatactacacagcagagtagaatttgcttctcactggaagatgagtagggcccctgcatactgtcttggtattttggattttatgattgttattgttttgtaattgcatactgtggatcaatcttcacctctattttcctttcagttacggacgagtttatgctgccgacccctaccaccacgcacttgctccagcccccacctacggcgttggtgccatggtgagtacaagtttctccttgtcctcactttctcctgcctcccttccctttccccagctgggacctcagtacgggttgacgtcctctcacttcccgttaattgaatttgtctcttgtgctaacagcagctaaaatgccacattaatcctcccagtaaacttgataaatgtcttaatttcttggcaatgtagtgcatgtaagttattatatttctaattttgcaagtctcacctagcagagcacttaccttaatggaataattagtcattttgataattaaatccatcactaacagaatgcagtgtcaatgcagaacttttttttttctttttttttccctcccttgctgctcattcacatagccccaaggttccagccccagcacagacttcagaggagctaagctgcacacttccaggcctctgctgtcaggcagctgagaatctgactgcctctcctcccctattacaattcatgtttaaagtcatagtcgcccaggaaagaaaatagagaggggcacactttgtgtgtgtacctagtacataagaaagtagaaggaatcagctgggtttgggggttgccttttgttttggggcaggtctgggtttttgttttgggagggggtggggggagggtaaaaaatgggaggtaagggtggggtgaacttgcctgtacttgttcaaacttctatgcactgaaactcttgagtacagtaagacgtgcccatcacgtgagagcatatgcaatcattacaaagctttggcatgcagttttctgcttggatcaagaatatcagtccttaccctaaaaatgaatccccataggcattcatttgaattgccaatacttttagaaaaaggaaatcgttaagtgccaccttgtagccattaaaaccatggccggacagttcactgaagctcagtcatagaaattcagccatgatttggaagcattgttttgcacaagcttaattacatcaagcaattcatctgtacaactccacaactcccttctcaagatcagattccatacagcttacagagccaagttaagtaagaagtaggttgagattttcatcccaattctgcattcaacaactctgcttcaacacctagtccacatgaggaatgtgttggagagttgaattacattcaacaactggtccaaattcaacctcaagtgcagattattctgttataaaaaaatgagacagtgaaaatccttccattgtccagcttataatagagtccttttagctaagaggactggctgacagaatttggttttgcagggaatttctttaggaggagctattggggaaggtcaggaatggccctatctttagttctccaagaatgacctgggatgggtagggggtgcctccatttcggttggttttgagtgtctatttttcacattagtctttttgatgatccacatgttgcaaaaggaaaatgtaaaaaacacacccctcaaattgctttgtttcagaatgcttttgcacctttgactgatgccaagactaggagccatgctgatgatgtgggtctcgttctttcttcattgcaggctagtatataccgagggggatacaaccgttttgctccatactaaatgacaaaaccataaaaaccttccaatgtggggagaaaggaagctttccgaggcctgagtattgcaatacatgcagtagtacatcattttagcaactctaaaaaaaaaaaaaatacaaataaaaaggaaaaaaaattacattttttatcttatacctcagatattttgttctgtgtattttaatattgtgggtctttaatttctgaaggttccgtagtttggttgctggctgtaggagtttttgtggttgatctagacagatgctagataatgaataaaaactggtttagggccatatccagagtgctatattatgtaaatgaattatatatgctgaatattaagctactggggttatcagctatttgggaagagtgtaagtgactacagtagtcatttttttctgcacctgcattattttattttgcgaaaggggaggttgggaggggcttaggggattggaactggggtttggctgaaagaaaaaaaaaaaaatgtaactgatgaatctaaacgacccactgcaccaacaatcatttatcaatggttctaagttactcattgccagttcaagccaaaggtcatgttgttaagggggtgcttctagtagcacttgtgcatctgagttgaatgaagctgtgcaaacccaccctttaaaccattccacccggcagtattcagcttcttaaccagtcgctatttaggaaaaaaaacccactagttaggccatcaacaagcattctttttatatttcttccagtataataaattattgatatcactgctgacttttatattatgggagggaaaaaataacattaataaaaaggtgataaaaaagcactgtttctatttttttctttttttccaaaaaaagaaagtaataaaaacttaaattctttgtaccagttaaaaaaaatgtataaaatttacatctgtgcagtggagttgttaagttctagaaacagtctatgaagctttagttttagcctagtagaacaactgttagagacagacgtataatttttatggaattacatgataatcatattcggatttatagaagcattttacaagtattgcaatcattgagtagagataatcatggtattttcatcagcttggtactttttgaaacgtgactgcgttgtgtgaacaatctgcaatttttcagtccgtgagatcctgcccttccacctctttcccatacccccaaggattatctcaaaatgatctctttagttctgtctccaaggcccaggacacttgtcagaaggatgcaaaaaaagaaaaaagtacatccaccctcttaatcccaaaagaacaaagtctccccacctttctcggatgcagggccagagtgacacagccgaaaaattgcagtttgtctgtacttctgtttgaactttccacgttgtcctgtttacaagttaacttaagttggggtatccgtcacgggtcttcctgttttgtatttaaataaaaacaacagcagcaggctgtccctgagtagttttgctgccataggttaagtcctcatgtgtacagtgcaggccctgtggcccgcacttcagtaagttatcaactctcaccgctgtgaacctgccaatccgctgtaacaactctgctttaaaacaaaaccaaacaaaactttaaaaaaaaatgtgtgatccagctttctcttgccatcctatgtgcatgccgtaagatcagttggatattaaaccatcaataaagtttcacaagatttgaaaacaaagtttctgtagcttcgatacctaagacagacgatagtgatcttgaaaagagaaaagggggaggggggagctacttatcagccaaaagcatataaagtgttcttttcaccagacttctttgggtgggtgaggggaggggcaagagggtgttttatagcatcactaagacattctcattcccccacctggaaaacagtgttatggcaatgggtgcctggttgatgttcttaaaggaaacgaattattaaaacactatgacatcctccagagggaagaaagagtaggagcagggggctatggagaataaatttctcccaattgccgcctcagatttcaaaatccagaatttgtattgtgtttcgaatcacaaacatagaattcttactgtgttggttaaagtaaaattcatttgcagttttgattttcatcaatgagctgtactttcccccatgactgtatgtagttttaataaaatcatttagagtgagtgagtgccaaccgatgttgcagaatcttttgtctaggcactccaagatgccaataagtcattttaaaatgtatgtcagagatgtaaacaaacattttggattttttttaaacagtatttatttggaatgttttcatttatctaaataactattgctattatgaattatggaaaattaatattatgtgtggcatatagtgacttcttaacacacacatcacgcaatctgcaaacccagaaaatgtgtatatctgtctttagaaattagtgtttatatcacttacagtggtttgtgaataaagaaaactggtttgtaatatcaaaaaaataaaagcttagtctgaaaaggtacaagttggtgttctgagttatttggcttccatgggttttctctctcagtgggtagatttgttatccacagctgtgattgcacttgggcccgcccggggatgtggggtgggtgttgcccaagtgagcaggaggctgccctggccaccagtagaccagatgcctcctgcaagttccctgcttttctggattaaaatctttcccttcctcactcattttcccaaagaagtcagtggaactcaccctggctgtttaagaaactgaactaagcttagctatctcctagcatggaagtatcaagtcttcagtttaaaacaaaatacatcactcatcttaaatatgtttgagctattaattactttttgggacacctcggataagatgaaaaaaatatagtaagtgctagagttcacatacattgagtgctcattaggagccaaaaatcgtgtgttccttatttaaaaatcagggttgaactgtccaccccatttagttacttaatatcttaatcctatctcattatatcttaatattcctattaagttggtatcactgaaagatttttaacatgtgcgttctagaaacatattctgagtgtgcaccctgattctgtcaacttgctggtggcaatccaggatgaattaaaccaaagtgctgtgcctcagtttccccaactgcacctcaggatcatctcactgacctaatattgttatgcagaagaaagcaatctcaataaagtgcttgcagcagtacttcataaactgtaagctattatccacaggtgaagcaactgagacacaaagattcatttctccaaggtcacagagcaagcaggtgatcaccctaggattccagaacgtgcacccttaactgacgaggcatgttctcacctgaccaataagaactttatacatgagcagtttaaccctgtgtgccacctgcagactctttgttctgcaatcatttttttttccacactgcaggttgtcttcacagcatctatcttatttcagtatatttaatcatcccttctctgtaaactccttatatatgaagaccatgccggttataaatcaacttgtattggcctatgtcaactgatccttaaagatagggttacccttattttatgaggacaggaaggatccgataggtcatatgatttgcccaaagctgtatctagcaagtgttgaaagagggcacaacatgaagaactgtcggaccctgaagtctgtgcctgctttattatcgatggtgatggtggtagtggtgacattaaatttgggattcttgtgctctccttacacaatatgtatggatgttaattaaaacaagtcgctagctttatcctcacaggtggtgggagggaggataagggtttcctaaaatactggtttatacctgagcccttctccactaaataggaggatataagaggtgatgacagatacagtttacattagaatctccaaaagcaggctgttatccaaaatagagaagc

SEQ ID NO: 504 - DNA, 429803 bp, Homo sapiens
  source 1..429803: mol_type = genomic DNA
ctccttccaggagctgaaatccacctgtctccatcttccttgcctgcctgggtactcatgccaagcagagactgggattaggggttctgtgctcttgcctaattaggaacattctcccatgtctcttgtgtggtcccagaaggagaagtgagtttgccaaggatatggggcaggaggctccctctgctgaccccctgcagcctggagccagcccggggactgtcctgggtggagggcaggtgaacacaagctgctgccggggactgtcctgggtggacggcaggtgaacacaagcggctgccgcatgtagccactcactcgactttttttcagctgtgaccattcccgggagctctttgagcctttctgtctcatttggaaccagggggaaccaggaaggggctcctggcctctctgtgtcctctgcagtgggggttgtggggggcgcagcatccacgccttgctgcccttctttcatgaagtctgttttttaagtgctggttcccccgaatattttatgcagaggagggaaaatttatagtggcaattattttctcacagtctggtgagcaggcaattaattaggagtaagggggcctagtagagcgtggcgtgtggcagaatcgcaccgccccggctccccagcccaccgccatgcagggctcgcgtgcgggaaaactaatatgccggcgtttaagcctgtgcccctctgctgggtgtaactgcgctgaaataaatgatctgacaatgtgaagcgtgcagtcgagtcctggtgtgatggggcgcgggcagcaccagcccggccctggatgctggctccctgtccagccctggccccagccccaggcttctgagctctgggttcaggttctgccactcgtcttcccatctccccgctcagctgagcctttgcagctgtgctctagctcctacccaccttccaggaggggtgactggggctggcgaagtgggtttaccttgaagcaacatggctccttgtgggccccaacaactcaggctacaccaggcgtgcagaactggctggagcaccagccatctatgcctctgtgccatgtccccccaccctcccagctccgtgctctttgttgcactgggtcgaccaagcacagctgtgtggtcaccagttctaacctttctgcttcctggggtgcattctgctctgaggtcacgctgtgtccagcacatgctgtaaccaggaaagaagggaccagggctggcctcgacctgagtccgagaggcaggccaggcagcacagatatgccatgagctgccacccacccagcctatcctggggtgggatgcagacgaccagcctggacttgaggattgggactggaaagtctagggccttctgacaccattgccacctggctgtaggccaaggcagggctgcatcccgtcctggcccccgtcctgcaccctgggccgctatgccctccacccaccatgcccgggagctgccagagcatacagagttgtcctggtttgaagaaagaaatctttattaataatcttaataatactgttagtttgaatggtcacaccttggaagcatacagaatggtaagaaaggaagcccggggctcggctgcagtcctggggatctgagtgagtcggggggttgagctgctgcaagaaaagggtccggaacagcagaggggacagggggctctgtacagaggacaaagccggaggcagggcgtggggctatgtacaacgggaatagaaaaggagaattccatttcaatagctgatgctgaatagaaagtgaggtgtatttttaaatttttgacacttcatgagacagtggagccacgttgggagcctgtattttttgctgcttccctacttcagtgctccctgcctcgccaggggttcctccctgccacctgctctgctcctgctcctcccaccgggtaagcctggctgtccttggtgctgctcccgccacctggacacctgccttgggagcagggaaggggccggcccaggcttccccatcccttgcccttcccatgggcccctgctctggctgtgcccgtccaggcccacagccactgtgactcccaacctcgcgatgcagccgggcgctggcccgtccctggccctgggcgcccacggtggactgggctcacaggggagcggcagggagggctgggtcccagcaggcagcacgaggtcagccttggtgtacacaggccccgggcctcctccagaaagggagagatggccaggaagagcaagtaagtccttggcctcagggcccacttggccacacttggaggtgtgaggagtggctcctggctggctgggcttccttcgtcctcccatggagcgcccctgagtcctggagccacgtcagccctttctgttgggagctggccccggggctactgttggacggcttcctcgccaggctgggggcacgggcgggactgccgggcaggagggaggtgggacgcaggggacgcgacaggagggtgacggggcccagtggagcccctgggatgaaagctgcccgcacccctcagccccgccggccccctggcacagctggccacaaagatcaagtcttgctagcagcgcctgcctgctcaggcccgggcctgctccgccgccgctgggctccacactgtctgtcttgggagttgggggctgggaaaggaagactggatggaaaacagagccccccacgggtcccacaagggaggccccttcccctccaactcccccactgcctgagacggaggggcgtgttcccactgtgctgccagccaggacgcggtggggccgtcctgtcctggggccgctcctcggcgcccctgccggcgtgctccctcggtgcgggcgtgtggccaggacgcgggacttggacttggttggatgcctcttggtttggttggttttttttttgttgcttggatcttaacatctttttttgttttttttgttttgtgattttttttgtttttttgtttttgcccttcatggtccgagaaggaaacggtggaaggtttcactacaacagaaacagaaaggcaggacttgcagcttctcgggggaggcacagcaggtgtgaaggcgacaggaccacgtggcacggggcccctggcctaaagtcctggcgccgccacacctgccccccaggtttccaggaccctcatcttccagggctgagtgtgggtggatcccaggatggggcccaggcagcccaggatgggaggagacacctggggccctgaggaggagacagagctgagcagggcagggtgagtggagaggctgggccagcacaggcttcgaggcggcctggatgagatggcagagggtgatggtctggccacgggaggtgggggagccgggccccccacggcaagggcctggtgggcggcaggacttcagccctcactggtggggaacccacaccctccagctggccttccagccccaggagcccagccgtggcacactcagaacctgaggctacttttccctgtcatggaggtacagatctgtgtgccccaggccagtgccaggaaaggactgtgcctgtcttggctggcttttcctaggcaggccagcaagctgcccacggctgtgctcaagtgaggtcccagccagtgtctccccagaagcgccatgcaccgggctggccagtcccagggctgaggaaggagtggcccgcaggccacagggccctgcctgcagtctccctaatgcagggaggggactgacctggggctgaccggcctgcgctcaggggagggcctgagcaagggtgcattctgcccctcatcagctctcctgcctgctgaggacccctccttccggaatataccccaataaagacatttcgaagcttggggacagggaaagtaggctgtgcctccaggacaacccccttgcaaggctggcctggccttggccctgcggtgctaaggggctccctgaggagcgaccaggacgtgcctttccacatttccactttctgctgcagcagtgctaaggagtcgcagagactggcgtgaccacagcagtttgcacaccacgcgacacgcttgtgactacgtcggcaagaaatatcgtcaataaaatttaatgaaaaatattagtttcagctgaatggggcgaggaggggcagtggctactcctgtggttggctgggtgaaggcctgcgggagcaccctcaggccggggagacccacactgggtgcctggagcccctccctccctgcgtcagggtgctggacactagggccatggcacggggctggtcgggtggctttgggggaggccctgccaggcgtttctgttgttctgtgcagcctgggaggccaggaaatgtggctcttgccctcatagggcgctaccgctactcccaggttgggggctgcctggtctcctggcccagcctggaccccacggtgtgcacaccgtacctgcaatggcttgggtagtacaacatcaacaaagtcaaaataggaaatcacggttgcagacatacaggaaaaaccagggtcaaagacacacacaccagcacaggtggggtggggagaccaactggctggagagaaataatctatagattttagagttgcagggggccagccgtgcgtgtcgctgaccgggaggggtgcactgtcttctggtggctgtgcctggttttgggctgttgggtttggtgtgtaataggcagtcagtgtgaatgctgttaggggctgggtctcttgctagtagggggtgaagcggctgtaccctcctcggcagaggctagcctgcaacatcaaagatgaaaaacagccaatcagtaccgtcttttggaagaggggaaaaagcaaaaagaaaaaaaaaaaggaaaaacaaaaagagaaatagccaagtctcgatttctttccccctatattccttggggagaaaggagttgggttgtcatggcaacaggaagagtaggacctgcctctgacatagtggtcttgggccagtgtggggtgctctggggtcatggccaacagtgcttctaggtcacagcttgagttatgtctgggtcacttctctgggctcaggcctggcctctcactgtccttatgcagagggggggtcccagcttgagccccacctcctcgcaccccagcagggtggcacggggcatcttcagagcactgagggacctcctggcgggttcctgggccttggctcaagagcctggggccactgaagccagctacgctgggagaggcaagcctgctgggcatagtgttcagagccttgctctctgggggggtctctgggtcctcctgggcccacctgaggcccagccctgtcctactggggagagcgggtcctggatgctccagctctcccatgtcctgggctgcctccagtcagggaaggctctgaaggggcctcccaccctcccaccacccagttttcccagaaaagaacaacacagcaagtgcaagagaagaaaaattggggaaaaatagaaaatcttaaaaatacaaagtgaaaacacaagagggaaccctccgtgcgttaatgaaagcttttagcttgcagctgcacggagggcccaagagccagggtatcacacctccatccgggtggggccgcaccagacccgcgcctgtggctgcccacagccaccacaggctgctgggggtgtctgaggctcgttaaaaattgaaaaaaaaaaaaaaaattggagggagtcatcaaaaccaagaaagatgggaaaaatccatattgcctctgaacctcctccctcctcactctcccaagatgttttcatctttgatgctggatgccaagctagctaaaacccgtgttcacaccccggggctggggccagtgggtacaggaggcaggtgtctgctggaagcagctctgggtgcagagtgagctgggctgcacgtgtcaacagctggccacacacacacacacacacacacacacacacacacagagacacgccacgccgcgcacctccccgccccgccccttccaccccacagcctgagggaggaggctggggcagagcaggcactgtttccccaggacgccaggagcccccaggaagccaggagctagagcctggtgagaagcaaccggtaacccacactcccctctcggatgcgatgcgagggggctgcagcagtgcgggtgggccgtgggtatgcggtgtgggcagaaacagccccggggccttgggagcctctgctgggaaggagaggcggccctggtttggtttctgaggttttcctggtggaaatgggaatggaggggcctcaacgggactttattatagtgagggagctcagggaaacggatcaggcacattggggtgctttccagaggaccagatggtacggtgggctgaccagccattcaacctgcttccccgcaactgagagggcgtgaggggccagccctcccctcaccctaactcacatccaggccgtggtccttccaaagtctccgggaccaaggcattggtcagagggctcggcctctcccccaagggcctcaccacccatgcccagctgttaggactggcacccagggctgggcgggcctgggctccttaccatggttccaatgctgtaggtcgccgcgggcccgatggtgtgatggtacgggtcggcagctgcgtagactctgccgtaactagggaagagcgtgggagggggagtgggaggagggtgggggaggggggcaggtgaggggcagcaacggcctcccacctcctcccagacactacatgggcaccctgtaccgaggtcccatctgcaaggcaccctcccctcctgcaaggcctgcaaggcctacccctccttcttgttaagaaggaagcttctggaacacaacaggcaaccctctcaatatgcccacagtgtgctgaccctgacggggtggggggagggggtgtgttccactcagtgctacgtggagggggatggtgtcctcatggagctcgtctgcagggaaaacaaacttccaccccaaaaagaatgtggtaaatactggggagggtttcaagagaagagagagggtcaacgaggagggaccaggaacactgcccccaagaatgtgacacttgtgtccctcacgactttcccttcagcagtttgtctgtgcagggaactctcagctccttagagagcagagctgggccacggcaccctgtacaccacacttcagggagatggagccggggctgccaggagggagggggtacaagcggtccccagaccagagtggtggagctcagctaccaacaggccagatgtctgaggggaaaggcactaggctaggttgctccaggaggaagcactcaagcgtctgcctccaagacagacagccactgtgggcacggggcttgcggggggcggtggggggactgggaatcagagatgcggtctccacctggggtttccacagcctccccatggggtaagcaggaagtgactgaagtcaggggctcactggctcaagggccacactcagacctgctcccctgtcccgaccctactcccgccaggcctggaagagtgggttacgcctcctgcctgtctgggcccagctccccagggatccttgtccatcttctccccaccctgctccagaacagtgctggcccccggcctcacctgtcgctgtaggctgccgccgctgcagcgggctgagcgtatctgtaggctgcgtagcctccctgcagggtaagtgggaggagagagagcagagggacttagtggggctccccagggaaaggctgagtggggagaggagacagaccctgtgcgggtggggccctgggagggactacagaccttcccagcctcccagcctcggctgggtaaggattaggtggtacctggcctgggcacctagttctggtctaacacaggaccgaggactgcagatggctaggtggcacagttcagggcgaggcaggtctgcctgtccactccattcattcactcattcattcacacatccatctgtgcactccacacacattagcgggtacccatgactcatctggctgggtgctaggccttggcaaggaagaggtgctcacagacctgccaccaggccactgaggcctgacttggatgctgaggggctgggagaacccacagtgactctggatagtgtcctggacaccaggaagggtcaagggtaaagggcacaagaggacgtgagctcagatgatgtcctggcctcaaatgggcaggtaactgaattgtaggcagctgcccaggactgaagggtggctgggtacatggggtgtggccgtcagtgagtctgagacagaggaagcagcacatgtggccccatgaagggggagaaaggccaccggaccccatcaaggggggtaggccctggagcacaggcacccaggggccctgcctcctggcccctcttgcagcccgtgctgtgggtgccttaggggctcactcactgaccgcagcgtggttagggacgtggcagagtcccactgcccccattatatgaggccttgcccacaggaagatggtttcagctcacagggctgctgggcggcccattaactgctcccttgatgggtaccaacaaccaaactgtgccatgctgggattctcagggatgccatactctgggcagacgtggcaccctcgccctcctggcttcaagggtgggatgggatgggatgggaggagcgggcagtgagagaggagacgccgacttctcattgagacccacagaacgcctgatcccaccctccctcccggcggggctacacttacataaatctcagcaccataaaatccatcctgatacacgaccctggaagcaaacggacaagaaagtggtgggaacgctggagaggtggggtaggccggctccggtgtctgctgaggagggagggggcacggtgccagccccgcccatgggactggcattttaacaagcgtttgctccagtgccctgttttggtataacaatagagtaacacccttgctgatcagcaactttctcccacaaaccccggggcccatagcccacccgaccccaggcagctgtgccccccacccctttagtgatggagggcaccagaccccagggaatgggagcagagagggctcagagaagcccctcgctgacctcaagagtggacaacggccccattaaagcatccagacaaggttctggggctctgaatgtccccctaaatgccagtgacctccgcgatgcccgccgtggtggggataggggtgaagataatggaggcagctgcagggctgagttctggggctcccacgatcctccccccccccaggtctggaaaggctgcctagcccctcgcactgcgcagggcctccccatttccctcctccccgccgtcctaccccctcctccacgcctcccccggcccaggtactcacgctccgtaagtcgggatggggggtgggggtggcgcagcccgaaatgtattatacacggcccggccccggccccgaagatgtgcgccccggtaggcaacggctgtgccggtggtggggtaggggaaccccgtcactgcaggaaacggggcccgagacacgtgtgagaggcacaaggggacccacctggcaccccctccccgtacacctagcccccccgcgcacctagcccccaacccctccccaagccccgcccccggagcgctactcagtcaacacggcgacgggagggcggggacggcccacctggccccgcccctcatgccccgcccccagagcccccggagccccacggggccaagtagctggtctcatcccatccccgccccgccccagcttttacctgcatagaattcaggcccgtagactgcgccgaccactggatttagcttccagcctaaaacaaaggcacagagacctagtcactgccttccccgacccttttcccaccaaaacgtatgcctgggaaccccagcgacaccggtggagcccttgggaacattcccagggcgcctccccgcgccgggcccccctttcccacactgcccggacaagtgctgagttcaaaacaccagggtctactccttcctgactcttctgcctgggggtctgctaggattctttcccaattgtgatcctcctcagcctgcccctgagcaaccctcacccctgggcgtcatcccccgaagcctggggtacccacctcccagaagagaactggagagggaaagtggaacttgttatctacccccctgagcacagctgggatgagggtttctggagtcagactcagcacagccccaccatccgagctccaggtggccagaggctgcaggaaaggcgcttggactctgcccataagctctccccactgcctgccaaagtccccgtcctgctccctcttccccgtgctgagtcctgctctcactttcctcccgtcctcatcttcccccagagcggctgtccgggagggtggcctgggagcaggtcgaggaggaaagggcatttggactgggaatgataataaggatgggctggttttcctcaacactgtgtgtgagccacacagactgttcgaaactcacggggtcctccctgcccagtgagccaccacaccctccccattttgcagatgaagaaacagccctggagaggcacagcaacctcccgtcagcagctggggagtggcagagccagggatcccagcctgtaatcggcatcccagcctctcccttcctgcaggtgggccagtcttcctctccccgggggaacccaggagcagagcaaagacctgctccacctggaggcctctgcgggggacaccagctgccttgcagtgggctccggctccaggcattccgacaggttgggcaggagggcttcttgacgaggcccagccccttacccctcctcagtgtacccaggtcttatctctacagcatgccccgtgggcccggctccttgtccctttgcactgggtggggaggaacagcagggacgagagcccactggccagctggggagatacatctggagagggtggcagtgggcccaggccatgtgtgaacccctgacccagattctaacaaccccactgcagggcaggcagactggaggcagtgaggacggagggtcggggtatgttcctccctctggccaagtcttcaccccaccccgcatccccggcccaccatcacacaaccttgtgtctggacgccattgctgggactttggaatcttccaaaaagataaatcccaggttaggaaggaagaaactttttttgggggtaggggggcacagtttcttgctctgttgcccaggctggagtgcagtggacgatcacggctcactgcagcctcgacctcctgggctcaagcgatcctcctacttcagcctcccgagtagcttgggccacaggtgcctgccactacacccacagctaattttaaaaactatctgtagagacagggtctccctgtgttgctcaggctggtcttgaagtcctgggctcaagggatcctgccaccttagcctcccaaagtgctgggattacaggcatgagccactgcatcaggctgaaagaaatgttttgttttctgggaagacctccagtccgaagaactgactcttcttactagaaggcccatgatggagcagagtcctggagaccctgaccccaagcccagactccccggggctccatccagtgactcttctgggtccactctgggcgagtgagacttggaggctgcatgtgtgcttcagatggccctgggcaccttcacctgtcaattctggcttcctggatgcctccaccggtgattctggcttcctgggtgccctcccctgtcaattctgcctctctgggagcctccacctgtctctgctgcctccatttcactgtctggaaccccagatggcagagacagcctgagactgcctggctggcctgtttctaccgtaaatagttaacacctgggcaaacctggtgggtttgttttctacaatggaaacctccacccccaactgatgaattccagagtgttgggtagtgttgaagccaagtcacgcagcactcgccaccagagcccatgggttggcttcggtgccaacctgcagagaacccagggccgtcccactgcagccctctgtgcccaggctgatgaagagattgagatgaaacggctcttgctgcaaaggtgggcaaaggttcccacctccctccattccctgatgtttcactggtgtaggttccgtgcccctcatgagccgcatagcccgaggccattcagagatgggtctgttctgatttccatgctcccctgaattctcacttctgcccagacagcggtgggtgtggcccttgggtgcagagtgggcagctggttccagagattttgcagccccgctggttgatcacctgtaccctataaaaatgtctaccgcttttacttcctgtgccaagtgccagatcacagaagagtcacacccaggacgcactcgggatgcttgcaaagtgggaacactcccaaatttttaaaaagaatttgagatgtgtaagtcctcagaaaagcaggatatgaggccatgagaatcaagtctaacttgggccaggccagaggcccggccccaccccagcatcggacaccaggagaagagctcgggggagaggtggcggatcgggcggtcctgtccaggcttccatgctggttgtcacctgactccacgtatggccgatcacatggggggccatgagaggctgggggtgacaccgtctgaaagtccacggcaacagggagatccatcccgtctaggggcagcgctgaggcttctaaggggtccgagtgggaagctgctccctggcaggaatgagcggaggcccccaacgtacgcctgctctgctcaaagcaggccccttgccggatggagttaagactcgcagtggccaccagtggtccccctgcttctccagagccagcacttagcgtcggcagatccatctccaaggaagaccggccacctccgtttgcagtggggtgcacacacacaagattcctcagtctccccttgctgtggacagcagggctcagcctggggcctcagggccacccatgtcaaaaagccccaggaaggcagttactgtaatcacatcctccgaaatctgagcacctccccccgggcccttcctcatggtgcttaaaggtgtcatttgtcatcgaacagctctgggggatggtgtcactattcctgttttgcagatgaagagactggaactcagagaggtctagaagctcatccaaggccccccgtgccctcactgccctccctgagcctgcttacactgggaatcggtgcagcaggtctcagcacagaagccttcaaactctggccctgggggaaagtcagtcctaatccaggaaggcacagctatccccctggatcagaagcctgcacgtgtggcctctgggggccaggcacgcctgggaaagtgagactccagctatggctgactgtatggggccatgagaggggtgagtggcccccagctctcctcccgcctcttctgccccacccgcttctgaccgggagcagagcggcagccccagggctgggacactggggacggaggctgcctaggatccaggaaggtcagcctgcagcagcctcagctcccccagggcctctgtcccagccagtgaccccagcagccttgtggggggacccagccccttaccgttggtgtaggggttccccgtcttcttgttggtcatcactcgggccgtggcattattgacctgttcaaagagggaaggagagagaggaagagggaggattagcctcctggaagacccactggccactcctccccgccctgctccgttagcccccggcaccccccgccccagcctcctctctccaccatgctgcctgccctccgggagccttggcccccactgctcccagcacgggctaaagccccgcctggcccaggaccccagacccaggcctgctggcctgtatccttcatgtggctgttcccataaacccagccccaggctcccaggcaccccaggacagctggagcagctccctggtggactctccacagagtgctctctgaccagaaccagctaagaggctggactccaggatgccccctcctccctgaggctgccaaggcccacctaggcatgggtaccaagatggccacatacccctcctggatgatgcccccctcccccgaggccagagtcctcaatgctgcagagtacagaggtctctgatggggcccgtgtgcccctggaggacgaggccgacagggaggggggctctgggcacgaagtcacctattttccacacatatgcctgggtgaggctgtccaggggcagcctgggatggagaagacgaggcatgtgtgggagggagtcgagaatagcaggggtgatgggtcccaggaaggggtctgggctgttctgcctcccctgcgtcctccattgagccccgagggcgtggggctgcagcctggccaagccagtgccttcagaagtctggaaacctcctctcaggcccttcactgcctgcctgagggctctgtcatggtggctggccccagccctcctccagccaccctttggctgccctgcctgttggggtacccagctccagacacccaggccgcagcaagggaacacagcccactggcactctggacccctggggagcagggaaggaggggacagagcgggatgggtgtcagggagggacccagggcccctctccctgctcctccttggggcctggtctcttcctctgccctggccattgccactgctgcctctgcttctacccaaacaaggggtggagtggggccaaggtgggggcaaactgcagggcccagactgggccatgtggggacaggttggggacagccgctgctccatggtgagcagggtctggggattaatggctccttggccgggtgggctggccatggtccttgaagctgccaagccccaaatacaggatttctggggctcctccagtgtctggttggggacagcgcctctcctaggaaaaggagggaagaggcaggggagaggggacctcgggtgagcctgaaggggtgacaggtgatagggctcagccggcagctgagcaccctggccttagtgcgacccttcctcccaccccagggaaccctggccaggctctctgaagggtgcggcagtggcagggctggttggttgggggagctggggggcaggtgggcgatcttggggcatccctgccgcagcacacttatctgagcacctcaattttccgtccctctacgatcgtcccattcagcttctcccgggctcggtcagcatctgagctagtttcaaaagttacaaacccaaaaccctgtgagcagaggagagggaaggacaggcacggagaggaggacacagggcgagaaagaggaggaagacgaggaagaagaggagtgggaggggggcaggggagtggggagagagagagaaggggttgagtcaggtgagttgaggcagagacgcaggcagcccagaggtctgtcctagggccaccggcaggatgccaggaggggtatgggccccaggggggcagctgctgacccagcctgagcccagcctgagctgatcacccggcatctccaaagggacaggccaaagccacataagagacgccatacctgaccacaggccaggcctgccccctgaaccccaccttggggtagggggcccaggctgggcttcaggacctgcaggggcagcccacccatctccaccctcggagcccagggtagagggtcgtgccttcctggaaggggagtagggcttgtctccgccggacaccctccccagcctgccctctctgtagcccctccctcaagcttcaaggccagtggtcccctggggtaagtgttcagtgggggtggggcccggacctggggcccagggctctggggtgcaggcaagaggtcctggtggctcagaaagaaaaagcggcagcggcagcaacaacacagacagctggggtgggggcggggcgggtgggggcggaagagcggggaatacaagcacccgtgtcgctcaggggtcctcgggcgcgaagctctccaggaaggaaacgcacatttcacacgttagcctggcgggacctacagccggcgctgtaaggcggcagctccgtgcggcacccaccttggagccccgctcgttaaaaatgatctccacgtctaaaatttttccgaattgctgcagagacagagacaaagagggagtggggcagacaggaaagtgcgggttaagactgctggcccagctgcccgctccactcctgagacgctcatgcctgtgctctgccctcggcccccagcttgggaaaggagaccggggaccccctcccacccctggccatggagcagctgggacttggccacttggagaaggcgatggtggggatagggtgcccaaggcatcaccaagagggtccttggtgtggtgtggggacagggacagctctcccagcctctcctggaggcccgtgtctcccttctgccttggggagcttttactgccaggacactaactccagctgccagctgggcatgggggtaggcacatcaccagtgtcccctcctcaccctgctaggacatggccacttggaaagggttacagtggggatagggtacccaaggcatgactgccccacccctaattcacactaaagggtaaaggtctgctttgagacccttctctaaaggatgggggagagggagacagagggacatgagtgtccattagggacaaagtgccacagagaagagaaagtgctggggtcaggaaatggagactgaggccaccggagagcaggacccctggttgggaaatgggaccctcaggcctccctgagatggggaggaggttgggcagggggaaaatggggttgagggtgtgagggcaagagggaagcataggagggtcttccgcccaggcccccgggaccctgcacagcctgtcatggggctgtgctggcgtgcggtgctgagcaactgttcaggtcgtttgggccagctgggccatgacgctctagctgccttcttccctcccattgttggccatagtccccatggggcagccctgtctctctcactggtactgagaccatgagcctgtgaacagccccgaacaacacttctgaggtccccagggcctgtcctgaagcctgcagtgcaggcaactgatgggggtttcccagtcacctccacacagtcctggaggcggggggtgcagcaagccccagtggggccagacagcaatgaaatcccaactctgccaggtgctgaaaagagggggacagtaacctccgttctgcagggacccagggagctgatgggggacagtgtccccatcctgcagggacccagggagttgatggcggatggtgcccctgtcctgtagggacccagggagctgacaggggatggtgtccccgtcctgcagggactgagtgtatgtaaacaggtcccctgcagggggcatccagccagagctccaaaatgtcagctgctattaaggggcagccccaggcccagagaaacctggcagcttgctcaggacccagagtcgagaagggacagagtccttgccatctgatgattctaagtcatgccagccctccaatgagtctagactgcaaatccaaccaggccgggctcctgagacggggagtggacttctagggatcacgtcagggggtaggtgaacggggacctctccaccctggggctgccagaggtgcttccagtctgcctgacaaatcccagctgggtcagggtggcatgaggggagaggctgggattcaggagccagaggctgtctacctgcgcagcagaggtggggtgggcaccgtggcaggcaggcggaagagaagtttggagggagggaagaaacacggccgggctgcgtggtcctctgtggccagggcaggcctgggagcctgggctgagccacccagctgctgccgctcacccaccactcggcagccccagccccctgcaggcatcaacacctgcctggcgcattcaagtccaataacaacaaagtgacccaggacccaggggcagccctgcacgttctcacggtgaccccaccacggggctgaagcctacagtgcaaaacccggaacaggccctcggagtccagcaggggcttcacttcccattgactgtgcatccggttccaagttccccacctgggggcccgggggacacaggcccggagaggttgactgcccggcccccgggcacacaagagaggccagggctggggctgctgctctatgggaggttgagctgcccctccaggtaccctcttgcgaggagacaggagccagaatgtgggaacagggcggtcataaccaaactggctgcgaggtcccaaggtactctaggaaacccctgagctcaggtggtctggggggcatgggtggatttctggctgggagcaggaggggtggggtttgaggggcagccgcaacagatccccctactcctcagcttgaggccttcctcttccccgccaccgtcccagcaggttcaggtcagggcagggctgggcccaggagggaaggaatcctggggccccggaggctccctgcgcagtgggaggcaggaaacccgggggaacaggtgtcggcaggaaggcagggcctgtgggcgccaccctggagctggggcaggtgtggagggcaggatgggtggggccgcgcacactcaccccgaacatttgccgcaagtcggggtccctgaaccggaaggggatgttggagacgtgtagccgcttgggctgctgcttctctgtagggtcggaggggtggagcggctggctgtccgtctgtgccgcctcgtctgtctgctgcagggagaggactgggctgtggaggctgcctctgtgtgcggggttgcccatcccctctgctaaagggtcggcagagtctaaaggccagattctccccacccttctgggcctctcccccatccctgggctgggatccttggcagaatctgggcagacggttcccatgagatacagcacaggggcacctcacacagagaggccccacctctaggccttcgcccaaactgtgcaggtgaggccgcctccctcccgccatcccagtgcaaggcctcctggcctgctctgttccccgctcccgcagcccaggcctgtccacagaggctgaacctccacggtctcttagccccactgacatctcaaggcagttctgggagcctgaggaccccactgtctttcaagtcctgatgatgaagtggtgaactgcagacagatgtcggcctggcccgagggtccgcctgtccgaaggtgctgcccttcgtgtcccccatccctgccatgctcctgcttattccagcctgctgctgccactcagaacctttggggttcacctccagaagcctctcccaaggcagggcgtggccaagtccagtcctctatagcccccatttggacccaaatactggtgggcagatgggctcccaaagacttgggtctcaggaaacaaaagccacctggcccccagctcgctgtgagaaggcaggggtgtcgcccgaggcagcgcagtgtggcctgtgtgaggcttttcctgcgtggtcttctccagtggactggccgtgagctcacggcaaggctggccttcagtctggcttggtcctggctgtatccacagagcaggaactccaggcatgtggcaggtgcttcatcagcatcggccgggtggatgcacgggtgactgtccgaggtggccattagctcatcacgacctaggcccaggcccaagggcctctacaggccagttccatggatgcagccaaaccgcaggtgccagcctcgcaggctgtttgttttcccgctcagcccactggcaaggcgggtgggtggcacaggagcaccagggtacaggagagtccctcggtggcgacaggcacaggtggtgggtgcacgctccagctcccgcggggtgccctggaggggttctcactgtccacacttcctccaacaatttaagctcagctgcccatgggaacagcaggctgacaatgtgccttttattggcttccttcgccttcccgcctcaattccatgctgccccttaggggttttgggagatcatctcccaaatacaccctgtgcatttgaatctttggctctgggcctcctgacactcccagtggacagctggagaccacacacggagaacccctcctcagaggccatgtggcttctgggacaggacgccagccgaaggtaggagggtcttggctccagccgtctggatcctttctggagcggccgtagaggagactggggtcccttagaggcctacacggcagccggtacaaatggaaggctggtagcatggtctcccgtgtggcctgcggagcagaggcagccagcctgcgagcaagaggaggaaagccaagaagagaggctccagagagccattcccacgcatctccagctaggcgaagcacctggctgctgaagccactttccggagggcatctgtcgcgggcaaccaaaggagtgctgagttaggacggtgagtggggagcctggggtcacagggctggaggcctcggcccacggcaaaggaaatggagccagggaggcagagccgtgccaaggtcacactacagctaagtggccacagcttggtccctcgactcctgtctgagtggctgtccggctgtcgccgcccccagcacggccaccctggttgtcctttctggaaggacaggctgctcccctgcatttccgcatgtagccagaaagcctctgaccaggctccagggcagcaggtgccgctaggtgaccagaggggaagtcaccacttcctgggctgcgcagggtggtggaggacacagcctcccccgtaccacagcttcttccctggcgacagcccctggcactggcagtggggcaggctgggagtggggtctcaagggctgtagggctgtggagcacacgtgtccacgttcctgatgcagctctgtcccctgcgttgaacagcgaggatgcagcacacaccccacagcgtgggaaccgctgtcccgatgctcacctgggcatgcgctgcaggacctgtctcagcagacgcgccatgtggtatgctgtcccaattccgacaagcatgtgttctgagctgtacgtgttcccaaggtgtgaggctccgggtggatcctgcatctccctcaggaccccaagaggtggaaaatggtcatggctctcggagggcatgagcccccaggcttgggcaagctgggcggctgctccttggggttccctgacatgtgccacccccatcagtgggggctgagctttggcacggaggcatctgtggtgggcacagctggcagggccaggagggtggatgacaggcctccggagactcctggtctggctggcatcacgtccccagtgacgggcaatgcagggcagctgactctggctcgacaggggtatgcgggaggctcctccatccaagcctggggaactggagatgcccagcagcccagtttcccagttctgctgccatcctccttggtcccaagttttcttgcagaaagcaagcctatgctagacctccggaggggacgaccttacccctgaaccaaggcgagaccgtccaaacatccaccgatctttatggaggtctgaaccccaccctcccattggacaggcgtgggtctttcctcctcggtggacagggatgtgcctgtgccctctgctgctcttgggtacaggtgactgagtcatcccagattcaggaatccagcctggagaggggcacacagctctggcctctgagcagcagagggcgatggtgggaaccagccccgcgcccacccacaggcgctggggcatccaccccaaagtcctaaaggggagcagccgaggatgaggcgggaggaagggggtgatggggtgtgagtgggaggagccatgagtggggccaggacacaggtgaggaagaagccattctatccctgctcagccccgggcagaggctaagtgggttcaatggctgtgaaaccgtcaggtgtgcagggaagccctcgcatgactgcacacggactgccccaggccgggggatgggggccttcccacactgactgtagcggtccagcagcctccaccgcctttccagctttctcaggggctttctttcccccactcaaaaaaaaaaaaaaaagccgtctttgcttcttgttctcaaatgcagggaaagagaaaaggacaggactgcccttccctcccgactgggctgggggtcctgcttctgcatccttccccagctctgtcttggcccggccattatggacacctccccagcccactcaagttcggggtgggggtctagttgccacacagcacctcccactctccacatcctctgaggagcctgcacccactttcgcctggggcccccaagcttggcacggagacagacaaagggaatgagccccaggcagggtctggtagacctaggcagaccctggacagcaggtgggacccggtggctgttgttggcacggaaccaagctgtgctgctgtggcaccacatgaaccggtttttggaaatcccttcctcgacagcgccgtctcccttcgttcctccaaagacctcctaggcactcaggcaaggacctgccttggtgagccgctggtgggcagccagtcagccttggaggaggggttctctgcgtgtggtctcaacctatccactgggagtgtctgcttcagagcctggtggcactggtggcccctccttgggtgaagctgttggctcccacgtggcatttgaagaacacaggatttcaagcccctcctgatctggcctctgcaccgtggcacgggcagccgactgacgcctcatccactcccacctcccagcctgggtaggggcatctcagctgagcctcactgtggcgttgctttggggaccagcgcctcctctcttccgcccttctcaggccagtggccagccacggcctacccctcaccccttccataagctgtgagagccaagaacacagtgaccaagggctgcagctcctggctgaggggagagggccttggccagactgtgaagcctgtagttatagatgaggtggtccaaatggaagatcagggcaagtgcgggagtttccgaggaggctcaggcccgacggacagcagaaaggacagaggttcatcctggggctgcaggtcactgggcagagaggcctccagggacctgggcgcacaggcatctatgcctgcagtgaagccaggggtgcagagcccaggtccccagcaggcagtgagggaggtgctggcccctcagacatcaggcccttgcggcccacgtggggtcccttctggcaggtggaggagcccacgtgggctctggaaaacaccagtctcatcccgtctccctctacctggctggccctccacagtgaccctccgtgctttgtctggcattttttttatctgcgtgctaatctctctctctttttctcagagttttgctctgtcgcccaggctggagtgcagcggcgtgatctcagctcactgcaacctccacctcctgggttcaagtgattctcctgcctcagcctcccgggcagctgggattacaggcacgagccaccatgcccgattaatttttgtatttttgtagagacagggttccaccatcttggccaggctggtctggaagtcctgacttcgtgatccacctgcctcggcctcccgaagtgctggggtgacaggcgtgagccaacatgcccggcccgttagcaagctgagggtcccttgagcacaaagactcccaagggcccacagtactggcacctgcgtgaccccgagtgagtgaatacatgctccagatggtgacccctgctggggaacacagaccctgggggtggctcaaggtagtgagatggggtcccccggtccttccgcagcccctcatcgcactctgtaccctttgctgcttttgtccagagaaggcaggtgatgtcgtggtgagcggtgagagaaacggagcctatgtgcaggtgtgcgtgccccttgtgggttcttgtcacatgtcccttcccatcacggatgagcagagacgcccctgccccaccaggaaggagcctccgtatttctggacggtgaaaagaggtgtcctgctcagaggggaggagccttcctggggaatgatgtagctggaaagtcactgggggtggtcgggacccacccgagggtatcgagaccacaaaaatcagtgcacgctccgccttctgtgggaagtctcagtgtcggtgagggaccggtggcccccaggaaccccatgtttctctctgcagggtcagctgtgcttctgtgactaggggttgaggggtgcatcccacctgggtggtggaggtgtcgggaaaggccctgagttggatgaacacggacttcccaccaattgctggctggaaaccctcctcgggggaggaggagcaggaagaggcctcgtggttccagaaattccaggaaggcctttccggagctggggcccaggctgtctttgaggatcctggggtggaggagacggagaggtctgaggcatggggatgggctgcaggggccactgctctctcccatcgacgccatcagccccaggtcctagaacggaacaggctgcctgtgtgggcccccgggcctggacaggaccctgccgtctaggggccggctctgccacagctaccagtggggtgggtgatgtgggggctggacaggcactccaagctccccctctccactgccctggccacaccaactgccagggcagcccatgctcaccagcagaaggaagtccccttgggcgagagggcgggaagccccagtggcctctgggtggcatctgggtccagggagcgtccagggggttgtgtgccctgacctggtgccaacctgggcagcaggctctcggggggggggtgggctgggtaggacttcagggatggtggggaaggaagagaccagggtacttggtggctgcacacgggccctcgagtgccccgggagctcaggaagacactctgacctaggcaggtctggaccaaagctctgaactcatcccacttcctatcccgaagatctagaccacaataccaggctgcttggggcagggccaaggggaggctcgagtgagctgaaagggccctgctgatgacccagggacagggtctggggacacctgagccagcagggaggcgttcggccttcagctgtgagtgccgggcagcctctgggaggaaggagctcctggaatctagaacaccctctccagctgccttccaaggtaggaaggctctgcatgaacaaatactccaaggttggggagcgcatggcctctgaggaggcccaggtctttgttcttcgtggggcaccacgccgatgccgtaacttctgcctgcagccctgccctgggtgcaggtcatggaggatgactctctcctctgggtccctggatgaaagatctgcagaccatgaccctgaaccctctgccagacctgagagaccccagcctgaagaaaggaaggtcaaggccgtctgtccatcctctgggctctgggtgcttcccacctggacacgcttcctgggaggctctggaggctaataactgggtggtgagactcccatcctcctggttggagagtacttcattggatgcagcattcaccttttcagcagctgctgctcactcggggattctctccatggtctgtggcctctcacgggcaagccagacccaagccagcctctgtttctgactttcctgtccttgcgtggcaggaactaggggacagggctgggtcctttcttctttgtagcctcagtgccaattcagtgcctggaacacggcaggtgctcagcaaatgtctgccgagtgaaggaagactttatgtgtgtcctggtaggctgtgtctggtggccccaggtgtccaggaggcatctggcctcggttctgttgttcagttagagtgctaggtccgtccccaagctgtgttatctgtgtgtctgaccctcctgcttctggttttcttctgggacgaacccctgaggctcaccatgagagaccccctcgtctgtccataaggtggctgtcagaggtttgagcagataagctgtgtctactggagtcagtcagaaggagacccagcctgctctagcgtgacttgtttatggtgaacccggcttggctcctgggatcatctctgtcttttctaagcacacacagggcgtgggtttgatgaataagaaccagagcagacagggaagcttggcccctgcttctaccaccctggggcctggccttttccatgtgtgtcctgtggctgtaggaaccctgggtatcaggatgctgggggcgctggaaaggctgatggtctcggggcagattcgggctgggcggggctccaagcagggaggaaaggcaccgcctgggtgccagatgagggtcgggtccagcccaggaggtggctgggtgggctctctcggcagagggcctgggtgacgctggaggaagcccctgcccacacatgcaccgggggaaggctcctatctgcgtccacgcagcacgctgggagccaggctggacggcaggagggctgaggcagtcgggagggggacccccattgggagccgccggggcggtgccactcccgggcagtgcagagagctctggcctcctgcccagccccgccagctagcacatccagcggctgggacagggccagcggggacagttggatgaacctggagccccagagcaggggcaggggaggcacatggagatctcagtggaggggaccagacaaaaggaataggccggctggggctctggggggtgggtggaggcagggcctggtttttgtacccagagcccactccaggccagccgcttggccactccctgctggctctctttgctctcaggaaatctgagaagtgagggctcagcacttttgcctgggagctgcattacaaccacataattgaagctatctgattggaggccagccaagcaggtagattacaagtgattagaaatgataggagggcctgcaacccgaggcagctcggagggccctgggccacctccacggctctgcctctgccctccgcccgtctccttcactttccactaacaggtctctggcagcgaggacacctcccagctggggtgagtgtttgctcgaagcagggaagccaggcccaggcggctggaggacggtggctgccaccccacccctaggtgcccggccattcctccagatgcctgctcatcacaaagctccttggcgccgggggtcgagcaggggctggaaatgccttcactgggggtgacttctggcccaggagccccgtaaaaggcctgccctccacacacagaggccctgcccaggcccctcgcccacctggtacacctcatgcccttctgggccacccttcttctgggtgggtgctcctccctgaagctccagggctgggcctggggtcgtgggggcccttaccggcactgtctgggtcccggcgatgggctgtgtgctggcctcggagcctggctgctcggggtgggtctgtgctggtgtgtacagggtcatgccatgctctgtggggaccggggtctggccggagtagtcctgcgtggggtgcggtgggggcggggcgtactcggcagggatgccgttctgtggcggaggggggtactgggcgggggggtagggctgggccatcgcttcaggcggagccgtggcgtcctgatcgctctgtggaaggagagagagcaaggcctggttagaatcttgtccccttcccggagcccctgaggatggggccttgtggctgagcagagcttctccagcagtattttcagcagcctttccccggcccctccaaggggggctcgccggcatgggcaccagctcagagcaggagggggtgctgcgctgggaatgccggggagcctggctctggagtcagacacccctggagttcagcccatttactcacacttgtcagacctgggtacaagaacaactgaagggtttttgtaaactacctgattttaaaaaaattaaccattttaaggtaactgtaggctcgtgcagctgtaagaagtaacacagtgatctgtacaccttgtaaccagggtcctcacggtaacatccataaaaccaccaccagcaggatactgacatggattcacacaacacacagaatgttccagcagcatgaggactactgctcttccccttttagagccaacccatctccttcccacctcaagaattttaagccttgacaggtggatcacctgaggtcaggagttcaagaccagcctggccaacatggtgaaaccccatctctactaaaaatacaaaaattagcgggatgtggtggcacgtgcctataatcccagctactcgggaggctgaggcaggagaatcacttcaacctgggaggcaggggttgcagcgagccaaaatcgcactattgcgctccagcctgggtgatgagagcgaaacttcatcttcaaataattttaagcctcagttttgtcattggaaagcagaagtgagagggcggcgctgcccagcccgcacctggatccctggaagtgactgtgcagaagctgaactcagggcctcctgcctcccctgccagtgatggccatgacagtgaggtgtgtcggggggcagggagggttccagcctctgtgtcaaggatctctgaggaactctcaaagatctgtctgtgccccctcaaaggcctgctgccccaagcggggaatactgctcctgcagccactctcagaggctcttagaagcccaggcccttgggcaggaccccagcagcaatacagggcagtggttgtcaaagtggcctgggcccacagcatcagcagcacctgggagctttttggtgggcaatgcgggttccagggcgcaccccaggcctcctccagcaatctgcgtgcactgagaaccactgacctagggcctgagaagcagccctggtggggagcccttatgatcccaagaggagggctggggtctttcacagtgccagagagcaaggtgcaggcggaggcggcagagggaaaggggctccggcctcctccactcgctgtcctccactgcagacacagcctggggcccaggaccccctgagcaggcgaggcactcgcccccccaggagtctgcggtgaggaggccccactgcctggaaggacagatgccgcctctgcctggagcagcccagtgtgttaggacccctgctcagatgtggatgggtctgacgctcagccaccctggcagggacaggcaggagtccgcgtccttgctgaaggtgggctttgcggtggggaggaggagcgcccagcagggaagtggctgctcacctccctcacctgcgcctccaccccacgctcccatcacccggggccacgcacgctttgttcacaccacacacgttagttcagtgagcacctactaggtgcaggcagaggctgggggctgcccccgcagggcggtctttctcccgcttccctccacacccacacatccccctctgccgggctcctgtgttctcggcctctgggcagtgcctcccctggctaaggaggagcccctcatgtgcccatgctccctgcacaggtggatctggcatgtccacctctgtcctgcctcccccacccctagcctgtcctctgcatccttcattcagttcctacaaatccacccaacaactgttgatggggtacctggggtgtgccaggcccatgccagggcaggggctgtgttgacagcaaccccgacagcccctgctccctgctggtggggcctgcagtccagcgggaaaggaaagcttcagagaacaatgacccgatgtcaaaccattgttacagcactgagggctgcaagggacctggctgcaccagggaggtggccccaagggacggtccaaggctgggtgttctgcttcagacccggccaccccctccttctgtttatggccccaaaccctctgcctgggggcccagcaacctagggtgggtgcgcatagctggaagggtggagcctgggcaacccagccgtgccctgctccctgaagcccccagtgccggccggccctgggctctgcagcgggggccgtctcggtgctcgccaccctgcgacagactcgctgactgggaacctaaggagcagaagtgctgtcctcctcccatccccacccctccacaaagccagctggctccttccctctctctgcagactctgaaactggggcgacattcaagctcctcagccacgggagggaagcacacacgtgtgcatgcgtacacactcgtgggaggttccaggctcattgccccaaggtagctggtgaggccccatcgtccgttgttagcaaacgtgttggtgacggagtccagtgggaaggggtggatccatgagggaggaggagggggaaggagagtcagggcacccaggaggggtggagagcatctagaacccaggatggccagaggcaaaatcaggaaaacaggagcaagagaaagtgtggaaggcacagcgtgagggccctgcagacacaggggagatgaatttgctgataaatatttgattagagccttcaccgccttgcactgtcttcccagcaaccccctcctccacctcctccaaggcctgagaaagagtgggctcctggttgggtgcagtggcttattcctgtaatcccagcactttgggaggctgaggtgggaggattgcttgagcccaggagttcgagaccatcctggacaacacagtgaaaccctctctacaaaaaataaaaaaaaaaaaaatagccaggtgtggtggcacatgcctctagtcccagtaatgtgggaggctgaggcaggatcatcacttgagcctggaggttgaggctgcagtgaaccaagatcacaccactgtggtccagccagggtgacagaggaaacccctgtctcaaaaaaaaaaaaaaaaaataaagaaaataaaataaaaaagaaagcgcagctcctgtcccatctgcttccttctcaccctacctctaaccctctgcagggctctaatccctgtcattcaacttggggctgaatgacagctgccaatcactctcacttgaggttctgcagggctgaagcccagagccctgagctaacaaatgacaggcgaacccgccaacataaaggggggagctccggcagtaggtgccagatctgagggcatctgtggtgggcaagaggtccctagcagatggggacattttagggacatttgtgacactagaataaaacagcatatttgagcccacagtgctccctgcttttacagacgctcactcattgagtggacacttccccctttcccagctaataaaaccgaggtgtagagacaaagtgatttgccaaactagtatgggaggaccccagagagcagcactggcagccaggatcccaaacccaccatatgcacctccacatggaattgtagccctgcccagggtggtttgcaagggagaggaggtttcacagccaagcatcggggtctagaccctgcaatgcacggggatgggctccaatgtcccctcttagccaccaggtggtcctggtgactgtctgtcctctctgcacaggtttctccatccgcaaatggtcacaatagagcctggacagaggaaatgcagaatgaaagccagccagcgtgactcagggggtcttagggtgacaagcaatatccctgccctgtgtgtcctccacagctgtgctggtgtggctgtggtcctgcaagcggctctcagagctggctacacatcccagtcacctagagaagtgtccacacctgggccgcactcctgaacaacagaggccacttacaaccaatgtttcccaggagactgacatgcagccctggtggagagccccagaccagaaaagcaaagtgtatcaggcccatcctgatagggtacgtgaatgcccagcacacagaaggctgtgcagccagtatctgtcccattgcttctcttcttcccaggtctgctagggtcagagtcaatgagggcctggggttgggtggtgtgagcggaggagttcctgctgggctatggggcttatctcagatgacctcatgttggaccagcttgtggaaggatctggttccccaggggactgtacattctcagagaatggggaccacttcactcaccctttgtccccatatccctgcactcagcacagcaccctgttctactcagaagagtctcagcgtacaagaacgggtggatgtacgtacgtatgtacgtatgtatgcatggatggatggatgggaggggtacatgggtgggcaggtgggtggatggaaggataaatggatggttggatagatgggtggatggatggattaaagggtgggtagatgagtggatggatcagaaggtgggtagatggatgagtgaatggatggatggaagggtggataaatgggtggatggctgaatgaatgagagggcagatggatgggtgggtggatggatgagtgcatggatgaatggatgggtagatggatgggagggtggataaatgagtggatggaaagatggatgaatggatggaaagaagggtggatgaaaaattggtgggtgtgtggatgcacggatgaatggatgggtggatggttggatggatagatgggtgggtgggtgggtggatggaagggtgggtgggtggatggatggacagatggataaatggatagatgggtggatggatagacggatgagtttaaagaccatggataagttgttatcctcccttcctctacaaacttgcccccctcttctatcatcacttgtgcctggcaaaactggtaagacccagctcttcctgctctactccacagcccacactgaggcagataaacacaaaatcaccctgaatgattcattcagaatccatgaccaccccctgccatgggccaggcactgccattcagctctcacgacctgaatgttgatttcacccttcctcctcaaccttccaaatattctcctttatcctcactcttggtgagaccttgcttcctgttttctaggaaacaggagacaacatccacattcacctgcccacctccctgcctcgtcacctacaccaggccctcccttctgtccccagggatgagcatcgtgctcccagacatgaccaaccacgtcacctgtacactagaaaccagcccttctcaccatcatatgctcacatctctggcaattcgccccttgcactccacagccatcaatgttttcctcctgccagcaccctgacaggctgcagtctctcccgtgacagggaaagaaaaccctccttgacaccatggctccttcatcctacaaactcaattcaccacctcccttagagcaaaacttcccaaatgagttgtctatacctgtggccccaattccctcactcccattctctcttggtcccactccaagccagtgttccgaggcaccattccctgaagccacctttgtcaaggtttttacatccaccatactgaaaatgcaatgtgaccattgcaatgtgactgatgtgtccagtccttgtctggtctgggccctcagcagcattagccatagttggtggctcctctatgtggagacacttctcttggctgcactgccccactctcagttggttctattttactggaagcttcatctgcattgctgattcctgtctatctctccaacatctggatactgatgggccccaaagctcagaactcggacctctttcttccctgtctatgctgactttctgaaggttttgatttagtctccaaattaaaaaaaaacatctgtatgttgacaatcccaaagttttatctccatcctggacttctccccagaatcccagctgccccttgcagtctccacttggacatctgatacactttgggggtttgacgtgcccccaaagggacctctgacctcctccgcattgcccccatcaaacccatctctgaggtcttccccatctcaggaaacacctgccccccagtccagcacatagtcctaatctgggggtcacccttgacttggctcttttggcccacacaccacaaacagtccagtagcaaaccccacaaacagtccagtagcaaaccccactggctccgcctccagccgccctgaaccgcccactgctcccaccttggtcgggccgccatcatctcctgtctggtcctcctacttcctccctggctcctacactctgtcctctgcacagtagaacccaaagtcctgagacggcccctcccccaccagggtcctgcacgacccctgctcctgcttctctcctcttgcttgtctactccagccacaaatgtctccgctgttccttgaacgtctagctgccacctaaggaatttggcacacaggtgtataaaaaggtgctcaccatcattgatcatcagagaaatgcaaatcaaaactacactgagatatcatctcaccccagttaaaatggcttaaatccgaaagacaggcaataacaaatactggcgaggatgtggagaaaagggaaccctcatacactgctggcgggaatataaattagaacaaccactacggagaacagtttggaggtttctcaaaaaactgaaaacagctgccgtaggatccagcaatcccacctctgagtatgttcccaaaagaaaggaaatcagtatatggaggagatatctgcattgctgtttattgcagcactgtttacaatagctaagatttggaagcaacctaagtgtccatcaacagatgaatgggtaaagaaaatgtggtacagatacacaatggagtactattgagccataaaaaaaaaatgagggcctgtcattttcaacaacatggatggaactagacatcattttgttaagtgaaataagccaggcacagaaagacaaacatcgcatgttctcacttatttgtgggatctaaaaatcaaaacaactgaactcacggacacagagagcagaaggatgatgaccagaggctggaaagacgaggggggtgtgggctgggggaaggtggggatggttaatgggtacaaaagagcagaaagaatgaataagacctactatttgatggtataacagggtgactatagtcaataataacttaattgtacacttaaaaatcactgaaagagcatatttgtattgtgtgtaacagaaaggataaatgcttgaggaggtggacaccccatcttccctgatgtgattatcacacactgcatgcctgtatcaaaacatctcatgtatcacataaatatatacacctactatgtacccacaacaattaaaagtaagaaaaacgaaaaccctgctggcactccccaccccctctacccccagctcagttctgcccttccccctctgagtgcctccaggtgtccatgatcaccgtctgcctctgcccccagaactagtcaggagaacaaggactttgtccctcctgctgctgaatctccggcatccagagcagtgtgtcacacacagaggggacacgctaacaacggccctaatggatggatcaatgcccagatgaagaaagacgtctcggtgggcgtgctcgctgaccaagctctagtgtaccccacacgtgccatctcatcgaatccccacaagcctgtaaggcaggctcagatgtcagccttgctctgcagatgaggcttgggcagccattcctatcgcacctggcaggcaggcggcaggcagtaaagtttggccagcccccgccttcaggggctattgatgcaggtggggacgtgcaggaaacccggctgtgctgcaggcctgctctgtgtccactgcctcgcggccatcatctcatctttacttaccattcctccatgtggtcggtaccacgaacgccatttttacagaggggccaaggtgcctgcccagggtcacagagccaaggttctcacatagactgccccctcccacacactctactgcacacaccctcttcaacacagcaggcagggaagcgcaagatgagttggcatggaggtggcggctggctcatcccagcatgtgagtgccactgggcatgctctttacaactccaggtctagtgaccacactgggagtctgaaatcagccctggtgggagcatttacaccacaggaatcggcaaaggctgcacatcacacataagggctggattgggatttgtcacagaagagagggttgttagacatttaccggcacgccactgcccagctcccttcaatcacacagcaaggtgaccaccatggctgccccggaggcctgaacgtgtggcagataaatgacactgaacgaggctgtctgcaaagactgcactcgacattttaaaatcaaatgcaattcaagcaacagttatggagcccctcctctgggcctgtatttagaggtgaacgagatggggccttatacactagaggatttctggtaccacagggaactgaccattcccagccagcagcagcaagggctggaaggtggtgagctccataaaggctaatgtccacgtgtctggcaaaagtgaaccaggggccatgacagagagggatggcaccagctcgggtgtgggggcagagggaaggtgttgcgggggtgggtggccagggctggccttgtaggcagggccagggctctgggagtggctggcctgccaggcccgctctccaccccttaccccgcctctgctccatgaacctggcagcctggcctggacctgtagccctgtggcttcctggtgacagtggggggtgggagaggagtgtgggtctggtgtatttggtcccctggttgcccactgggaggctgtcgtcggctggctctgtcctggaccatggtggactgaccttgtctcggggggagcccagtccacgactctccccactccctggctctagtcattgcttcctccacgcgctcctccgggcctggcgtggtgatggctctgtcgtcgccagttctggggtcctgtgctgtccctggtggtccctccaaccctgacctctagacgcctccttgaaaataaactcgtctccaattatccgggaatgagcgagccacctgctgcctgttggatcctgatgacatgacggtgtggggcgagggcttccctagcccaggacaggcaggtggggccctgagcaggttggggctgtggctggctgtctgagccacagggcctcgcctgggctgtgctctgggtgtacatgtccttggtcccaggaccctgtgcactagccccaccaccactttgggcctcagcaacttagtttgtgggatggggacaatgactcatctgcctggaggcagggccgggcagaagcaccctccatcttccagacctagagctgaggacccccagaggtgtctgcccacgtcgctggcccagtgtgttctctacccggcctatcccttggccaatgtgctctccggtcctgcctggtaaggtcccccagcctgcgtgtgggacaacgggccggcagggagctcagggagcaggcggcaaggagacaggctggccaatggtctggccgtggatggagcccctcccgcacggcctggccgccttccctcggcacagcccttcctggctccctctcctctcaggccctccaggacaatgaagctaattgccttcagacggctcccgcctgcgggaagggcgccgcgtggccctgggccggcggggcaggctgcagtgggagtgaggctggtggcgaggctgggcaccgggccatttctccagcacctctgggcaaagcccattccaggcagaaatggggaagggagggagggggaacgccaggccccatccgccgagctgtgaggtgtgtcacagcctgtgccacccatgcaggtcacctgcctgcccaagaggtgagtccacccacctgcagatctgtgctgccctcaccctcatagccactaccaccccctgcacatttaattctcctgctgacctgcagaggtggatgtcacaagctgagtttcacagaggggacaccgaggccagcagctatgtgttccgtgagcaggaaagcccctcaccccctccccacgatctgggacacctcagacttcctggacgcgtctgccacattcccagtttgaatgcggttggaacacagacgtgtgaaagtctggtgtgaggagggggcttgaggctgtcagccccacatatccctgtgatggggaccagaacaggacagacggatgtccacttccagagtctggggtgggggccagagccatctcaccaagagcgtgtggtgccctcatgtggcaggcggcgattcacaggcaggtacccgatgtgagcacccctgcccggcccacagccctcccgagatcctggaggaatctggtgttggaaggggaggctggtgacccgggggctgacctctggcaggtagggggtgtgggttccagtccctggggtccctgatgatggctggatcaggtgacctcattactctgacctcccctgcctggaagcaggggtggtcctgccctcctccctgtctatacacccaagggcgtgcaaacgaggccccatctctctgcatggcagggagtctacatcctcgtctctggctgcaattgagcaccctgaacactccttcagttctagaatcttagaacaggtagtttctgcaggagacacccagcccagcccgccagacaaagtctcctctgttccctccctgaccggcaccccggacctctgctcaaacaagcctcctgaccggtgctttactaacgaggaggctccttcagtccacctcagaacagctctgccactcactgagctgaaatctgccttctggaaacttccacccggcaccgggctttgcaggcatcccacagcctcctcttcgcaggctggtcctccaagaacgcacagaatccacctctctagtatgtttggcttgggtgaagcctccagtttcctgagtggccaactgctaccagctttgcccatcctggctgctcctcagcacgactccaacgccacattcactcccaacttacaggtcaagagtcacaggcaaatggctctggttggatctgaatccgggccagccttccaaattatcacccgacgtcaccatcatgcaggtccgggtgcacccttccttcctgaggggctgggagcagcttcacttcttgatacctgagtgcagaaaggggggctccccagctgtgcctgcccaggtggccagttcaagagcagagtgggtagtttccacgagccagaggacaacccagagataacgcatcaacaggaacgatgagagggagacctgagggagaagcaggtgtccagagcggtgagggaggagaggaggtgggaagaacggaggaacagaagaacaggcatttctagacaatgcatttgcttctattttcttgcaggtgatgctcctattttcttttctttttttaatgtgcatattacaggtcaaagaagttttagggaaaataaaagattatctaaaacggatgaagattaagctggaaaacatgatgatgtcaagggaaggcccaggtgcccccgaccggcgcccttgagcccccgcatcagaggccggttcctattgctgatgtcacatcgtgtgctggggtcgggtctggttccaggaaagatgtcctgccatgattaaagctgcactgggctggaacagcacgagttatctggatatctccgaggagggtggagctggccccactcataagagacctgtgacccccgatcccaggaggttcaagatgaaaggcgtctcagagaacattctgtccactttgtcaaggagaaaatgggcaccggagaggctgacttgcccctgtcacgctgcccccgtcacgctgctggtgcgggcagggagccctgctgttctgcatgtctgcaccagcaggaaagtgagcaatggtgtgcgtgaatctgcccccaaaatacacaccatgcgaccgctcagcgccaggttctagatgtctgggcacagcagcgggtagagtcctaccctcagggagcagactcctggcggaagccctccccagcattggctaaattggagatgcatgattccatgctcaggggtcccccacttggcctctattatgtttggcttggtcgaaacctccagtttcctgagtggccaactgaaggctgggcacgtcctcctggcattgagcatttgcttcagtgactcctagagaggatcccccatgtgtggatgagggggggactttgcttcccagaagcacaaataaaccatcgtgagcgttttctacgacccactgaggtcccagaagcaggttttccccaggtgctttgtggacccaggatccgccagggctttcccaggatggaggtcacaggtggcagggggacaggagggcccgtgcagccacagctctctctcccgcaccaggttcctgccttcagactcagctgcttcctccgcccagaaacaggccacctctacagctcacaggctcctaactccaaggtctgtggttccggctggactgggagagtgagcatccctgccggatgagagcagaggcccctgaccagcatggaacacccccaaaagccaggtcgtagccagcaaggtgagaagcctgggagccggggctgcctgcccctgctcctgtggggactcctgctgtgccaggacgggcagctcaggagacctctcactccagggcaatctcatgcctccttatcaggagctcttcgggagtcatccccaaggtgcaggatgtacagaggggtccctgcaggtactttaaagccagagaccttggtgcatggccctgtttcagcagaggtgctattgcaaatgcctcaggccagagtgaggctatgatcacagtgaagaaacctctggtggtgctttgccacctgagcccacctgaactttccagaacctcagcagtggagggtagcaccccagaccccgagaccctgagcacaagtgcttgtgcttccatcactgagtccccaggggctgacccggttcaggcacatggcaggtgctcagtaaatgctgagtgatgctgctgctgctgatgatgataattagagtagtgacggacggtggctgaaggcttacgaatgcccagcactgggtgaagcactgaaagtacattatttcatttaatcttcaatgcgctaaactggcattcttgatgcaaggaaagaaactcagagtggggaagttacttgcccaagcacacacatccaggatgtagcagacctgggatctgaacccaggcctgtttgatcctggaaccacctgctgctacctgacaggtatggactgctttccaatccggagtaagagggtgtgccctagagacccaggggaggaaggaggggtgggcagcaggacaacgctctctccttcccccaagccccccaggctcctgctgagccagttgtccaggcttcctgagttcattctaacctagtgaccaaccagggtttcctgagaccctgatatgcacccacctctgtgcttgacactgtccttcaaggtgcagaggacaccatagcctctgtaggggctgactcaggacctcccctgccccaatggggagaggtagtggtgtgctggtaacattaacaactggctccgtggggaaaagactgcttgtggcgtttgccaatttccctggtgtaaatactcccaccattgctggttctaaactaccagcctgaaatctctgaaggtgcagctgggaagagatacttacagtccagagcttatatgacaccccagcccatgccagggaggggaggaatgggcggacctgccccagtcgggctccaattcactctccttgccccagcaagaggtctagggaggcccaggaatgggggctggtgagcaaatgggagctctgcaggaggagggcaggggctgccctgcggggaccgggaggaggctgggcagcgctgcttgctggggaaaggctcaggaggtgcccaggcctggagcaggaatgcacctgagtgacttgctcccaccccatccaacccattctgtcccctgacagcaggtttaatatcttttattaattagggctgtcggacgccccgccacactgcatattacttcattcagggaccattaggtctccatgttccacagccaccggctctcaggtccccttcccccccgacttctccacgaagacttcctggaaggcccagggcagatcaagagcctgcccccgcccctcagacctagaggggcttcagggatcatccaggcagagccacactgtgggtgagcagggctccgaggcccacagtcacttcgcaagccaacaacccgccaccaagtcgcatgctctgccgcctgctgttggcagtggagggcgggcacaggctgggccgctgtggtccctgccaccgccctctgccaggagcgtggatgtccccaccctctttctctcctttgctcaggtccacagcttctcatttccccctagggcctcagggctctcccacagtggcgtgagggcaggcggtccagcagggaggcgctgagtgggccatggggcagacctccctgcaaactccaggcctcggcatgcagcctgctctccaggccccggtggggacaagcctgggtctcacagagcccgataccgagcagtcttctgacacagtccctggaacgagtggagtgccctgtccttcagcccgggcttggtgcgggatggggcctgccatgctctaagctctggcctccctgcctggaggcgggacctggcccaagcctcaaagccgaagcacaaattcctcatcagtgaagatccagagccgccgtggtgctaggacacggtgcgcgggaatcagccccgcacctgcaaggcagcgtgctctgcgtgccctgcgtgtgccccatgtgtactgtgtgccccgtgtgtgagcatgtgtgccccatgtgtgctgtgcccccatgtacttgtgtgtaccgtgagccatgtgctgcgtgtcccgtgtgtgctgtgtgccccgtgtgtgcacatgtgcgccccgtgtgtgctgtgtgacccgtgtgcttgtgtgtaccgtgtgtgagccatgtgctgcgtgtgctgtatgctgtgtgctccgtgtgttctgtgcactgtgtgtgccctgcgtgtactgtgtgctctgtgcccatgtgtgctccgctcagtctccatgtgccctccgtgtgtattccatgtgccctccgtgtgctgtgctctgtgcacgctgggaacagcgctagagcgtctgtgcttctggacaggaaaacaagcccctcgtctaccttcaccgtcttccagctgaacgttggtagcacctccacccacagacgcggctgcaaaccccacggcgtgagcccacctgacgcagcacccaccaccacccgcaggagcctcaggccttcctgttaagcgtcgccactccgctatctgctgaccttcacgctcactccaactccaaacctgggcctggtctctcacacgttaggaagccacggatcatgttttcatgcacgggtattttcttttggtaactgtatctcaatacaattggtttccttcataataatctgttttattttatgcatttaagaccattattggaagaaggggtcagatattgaggggttcaaggcacaagacctggtagaaaccactggcccagtgatgccaggggcctccctgctctgatggctgagagatggccccgaatcctgcccggccacctggccagagcccaaccccagccccagaccagactcagtccctccctgctcaggtcagcacagatctcagctgaaaagcgccagacgaggggacagattttcacacgattaagcggtaattctctccaagctcactgcatacaaatcataaataatgtggctccataaatcctcttctcccaccagcttcacctccacctactctgcgtcttgcctggggaaaatcagcaaggagccaggtgtctggctgatggggcttggtcggcaggtgcagagcggggtgctgggaggtgagttcacctcgatggtcaatcagacggacggaaacaccaacagttcccagctcccagggtgagggggcttgaggctgctggccagctggggctgaggtcagactcaggcacagagcccaggaggggtctctgcagcgggtagactggggtggggtggggtggggtggggggcagagggcgtacgtagaagagcactgcacttagggtaagcaaaggagctgagcgacgcgggccaatcactgccccggatgagcagcggcctacagccctattccatgcacgtccctgccgtggtctgaggctgtagctctgagtgtgcacgtgtgtgtactcacgcaggtgcaggcgccacgggggatcagcacccggcactgggcggctcccctcggagccaacaggaaacagcgtacattgctggtctgacgggtgagattggcaggagtgccagagctgctgggggcagagtcgggggtgaggacagagggcctgggtgcagggtgtcgcggtcctctctccccctgctctgccctcaagccgcaggcatccgcctgactcgcccttgagcggcctggcttccagctgctgctcactggccctcccctggggctgaggagaacctcgagagcagcaacactggaggacagggagggggtgcaggcgacatgaggaaagccgcaaggattgggaagagagcacccaactcctctgagaggtaagggaggcgcttaggaaaagcaaagcccttcccctgggagcaggaaccctcttctccaccctggacggggcgtgcgggcccgtgggaggctccaggtcctgaggatgatccccttgccctcatcgtggcccctataaccaggctgctctccatttcacacacgagcaaagtggcctgagccacacaggtagggggagctgccaaggctgggtgggcctcaaaccccagcgtgggggtgaccaaaggcctccttcccatccaaggagaccttctgcctccagggaggagggggagctcatggtggcctcctgcccctgcccacaggagcagggtggggagcaagggttctgagatcccggtaagttaccaaggcaggggccagtgggagaagacagaggaggctgcaggggaaaccagaggagcgggtccctgaggaggcctgggcccagccttgtccatccatggtcactaccagctcctagcagagcttcactgcagctctcatgcagctcccatctcaccttgtaccttcccactcactcagctgagatctgtttgctgagcacctactaggtttgctgagcacctactagccatctctgggacaccatggtgaaaaacaccaccccatgtggtgtcatggacaggctttgtgcagagcttctctgctgtgactcaggtcttccctcctctaatcctcctctacatccttgaggtgtccaaatacctcctctgggaagccttccaggctacccctacccagctgtgatctccactgtactcagttcctcctccatccttgctcaagtcctgctgagatgctgctgtgaatttatataagcaggtgagtacacgcagcatccgtggtacacacagcatttggcctacacctgagggtggaccaggagacaccaggttcctactcagtgggatggcaagaacatcatccaggccaaagctccctcccagggccttgtgaggacaacgcaacaggtcagctgtcaagtgacccaccagaggagaagcgctggctgtgaatatcggagcagcccctgggcctctctcccccagggttccagggccgcttgctctgccagctacagaggcatcctcgtttctgttttctgcatattcattaaggaatattagcattattaatggcccatggtcttcatttagcaaatggaacaggatattaagcacagtgcccaggacatgaggtgggcaggagggggtggagacggcgggaaggcaggaccccacccttgcactctgcacccagcagcctcaggtctgggacgttcccctgtccctcccacggtgccctggggcttccagcagccacctcctagttactgtgagctccaagaaggcggcttcaaatgaacatttgcaaaatgtaattaggaaggtaaatttcctggcaacgaagattacataatgcgtcccacagccaaacacccacctggtggaatgtggttggaaaactggatgtattcatcacttgggatcagtcccctgatgatcccttctttaatgggggtgcttgggagttggtggtccgggcagtggctctgggagggagactctgtgggtacagaacccctgggtgctcacgcctggtcggtcacatgtggctgcgcacagcaggtgcacacagctctgcagccttgcagctgggacacagtgaggtctgtgttgcatggtgagctttgagactctgctcctcaaagtctggactgcggaccctgtcatctgctagaaatgcagattcctgggctgcaccctgacctgcagcctcagaatcacaaaccacagctgtcccagggagggggtcctgaagccagttggcaccctgaccgtgtcagagacaccatgcaggggcacagttccccctgggggaagaggcagttcccccctgcgcctgggcccaaaaggacgccactcggaacatcagggacagcagccaccggtggacactggcattcccaccagtggtgctgaaacagctggtgggcctggaagaggggtctggaggaagagcacggcggggctggcttctgagtccatgggaaaggccacctgggcaccctcagtcacagcagagattgaggagggggcagagacttggtgagggagggggactctgagtgccgtcctctgagaatcacagtgagtgggaccccatctgatcccacagatggtgaggttgaggacactcagcacacccaggatgaggatacgcggtcacgaggtgaggggcaccacctggtctagaaccctggcccagggggcagcaggtgctctctgcttcacctgtctgtacctctgagcacctgcccagtccactgcccggccacagccagggagactgagtcagcgccgcaggccgtcctggggctgtgtttcaactgtaaaatgggacaggcaagggaaggcggtggggtcctggggaggtgagatgggtggcggtggggtccctggggaaggagccaggccaccttaagtgctgtcctctcataaggaaaaccttgctgccccagccattagcctctcctccagcaggacacacctgccctgagccataccccacctttggagggggttgctctgggctggacacagggatgctccctgggaggcctgagccccttacaggatgcccccttcccaagagcaaaagcagggcttccaacaggggggcatctgagcaaaggcctgggctgcccatgactggcccgaccttccttccaggtgctccccagcgcagtgggggcatcgggggagggattccctgtggcatgtcccatcccacccccatacaggatctctgtgggaccattccttgccaacctttccccaaaggaccagaaactgtcctcacccacgtccctaaaatccacaagcggcctggcatcccagggctccctgccccctctgctgtggctaagacagcagccaaggactcagagatagatgcttcaggctgggggacacacgaggtcacagagtccctccctaagacgccagccagggctgcgctatgagctgctgagagctgagagcttgtggattccacagctcctcggccacttatgctgggtggggtcacagttcttggcatcaaacctgagtcccccggctgcagtctgaacctacttcctctggcactgttctgttcctagctaggcggaggcctgggtctccctcctgtacatctggacgggtgaagactgagctccctggcatcccgtgggctgcctgtttctgtttcccttctccacacgtgccgacctcagagacgtgacagcaccttcgccctggagaatctgttgtgtccgtcacgctctccctggctcagccctgacagcccccgcagtacgcgtgcaccccacactgccttcatccactgcccagcccacgcctgggcaaggcccaccccttccctatgacccctcccagccagaggaagtgccatgggagcggccagttgcacccctatgtaaggtggtggagcctggactgggagatgcactcaggaactgcttaggataagcacgctcgtgcagaccgtggcaggagcgtggggaggaaggaggacgtgcctggcccaggagcggaggggaccccatgctgtgaagaagcaccccccaccggccccaggctaccagacctctcactcagggtgggacaacctgcaccaaatgggtccatcctgtgctgctggccactcaactttccaggcactggggcccctgggtctctcgcccaagctctgttggttggctcagcctggcgtagcactgccagaagatggggaaggtgctgggaagcaccgggaacctgctgatcctcacccggaaccgagctctcagccagggtccccgacctgatgtctcagtcctctcaaatgcctgccccagggcaggcggcagtgccaggccagctctcatctgagcctgctctgctcccatcaatcagtagcaagctcctcctggcctgtgacagccacttcctaggagatagtcaccacctggcaggggccacccctctcacagtcttaagccagagtggacgattcacactcgctctaagaaggaggctccatcccaggggcgtggggacagcttgtatggtcctgggattctgcacattcagccacacgcctctgaccttcacaaccctggcatcccccaggactcccagaggtccaggccctcctccggctcgagatcttcccttcaccagaggcacccctgtttgggttctgaaccccagcggggtagcccctggatgcatcctcacagagacacacacacgtgctcacatgcatggactcacacacgcagcctctgtgcacacacgcaggcctcgtggacatgtgctcacacagaccctcttcatgcacacacacacacacacacagccctgttcatgcacactcacaagacatgcagtccctgtacacgtgtacacacacacacattcccagtgcattctcacacaagcacccctggatgacaggagcaccctccaacccccaggccattgtgaaattatcaaatatcctcaggcagggggcggggcaaaatcaccccctgttgagaatcactgacccagacacgccttacccgacccctccacacacacgcgcctgcagtgatcgtgcacgcagcagtgcacctgcacacctacacacatttcccaccccccagtccacctgcctggacttgggcttgccctccactgcctgccccccggggcctgagcgcctcctttcctcccagccaagctgctggcgcctggcctggcccgggcacgcggggagggtgtcgggggaggaggcggatggcttcttttcccgttaggcgcctggctcatggaagaggcgagtgtggatctaatcttcagctgattaaatgtccctcattaatgagtttctttaattaatgaagtttttgggtctgctccacttgctttattccagccacactctgccttctcagcacaaagcggggccatttcctcccgggtaattgagggagccgcggcccgttcctgccgacgctgcactttgctgattgcgcctgtcaactcggggctgacaactccatttttaaacatcttcttctctagaagccatgtgcacatgtgtgcttgcacaggcggaggcacatcccaggcagcccgcccccgccaagcactgtctccgtcacacgccaggcacacacacgcccactcacgcggacaaggcacgctcgtgggcaggtctgatctgcagctgggagcctctccaggcacccagaggggcgtgtgtcaccgagcctgcgaggcacactcccaccgcaggagcaacctgtacatgcctgcacactcactgcacacatccgtgtgcaacacgcacactcagaccgtgcatgcctctacatacctgtattccccatgtgcatacacacagtacacactcgcacactgtgtggactcacccgagcacgctcgtgtgtaccatgtcacacgcaggtgtgaacacccgcacgcacacactccacacatacacagtgcacactctcatactgtgaacactcactccacactctcacactgtgaacactcactcccaagctcatgcacatacacaccatgtcacagtcatgtccaggtaatacgtacagcccacactgcatccacacgcatatacactgtgcatgctcactcctgagcacacacaaccaaaacacacattacacctgtatggtgatgcaacccctcacccacacacacatagcacgtgttcacacctcctcacccacacacgcacatacacagcacatgcattcacaccctcacccatacacatggacacagcacatgcgttcacaccccctcacccacacacgcatgcacacagcacgtgttcacaccaccatccacaaacatgcacacagcacatgccttcacgcccccttacccacacacatgcgttcacaccccctcacccacacacatgcacacagcacatgcattcacgccccctctcacccacacacgcaggcatacagcaatgcattcacaccctcacccgcacacgcacacagcacatgcattcacacccccctcagccccacacatgcacacagcacatgcgttcacaccccctcacacacatgcacacagcacatgcgttcatgccctcacccacacacgcacgcacacagcacgtgttcacacccctcacccacacacacatgcacacaagcacatgttcacacccactctcacccacacacgcacagcacatgcgttcacggtcctgccttggcatgctcacacctgggctcacacccatgtccacacacattccagttcacacactcacctaaggcaccctccccacaaacacagggccccccccaccccgacacagggagaccacagatacacaggcatcaggcagggctgtgcccaccccagaggaggaagagcttgctatggatgcctgcatgccaggtgactatgtctccaggtccacctgtcatccagatgacctgcccagccgcatcttggccctgctggctgcacttcctgctgtgactgggtgccagctctgggctccagggcctggaaggacgatttacaccttctcattggctcgtgaagagctctctgaattaaaagcattcatcttctcctgctgaccgggatgtgggctccttccccgtgaggctggccggaactgggcaggcagggtcacagctccagagccagggaggaggatgcactgccggccagactctcctgtgggtgggcacgtggctgtgatgcagtgggggaccaatgggacaattctttcctaccaggatctgcccaccaccaaccgcgaaaaaggagatccttcccaaaggcagaaatgggcccttctgccgctagggatcagccaggagtggctgtgcccagggcaggatgagcatctctgcactgacgatgccggaggggcagaaccaccgtgtgtgcccggggaggacgtcttgctgacttcatcccagccagacgacgtgggtgtcactatccccatgttactgatgggaaaactgacgccgagagaagccaaataagtctcaggctttccctgcaggtaaaaggggcagggccaggcctggtgtccagctctgtctcactcccaggcccatctctcctggtcccgcggccctgccaggccaccccgccctgtggcttccccaagagggttctggcatctccatgggtagctctcccgcccagcaatgacagcctcgcatgtcattgaccagactcttcctgcgcagcccttggcagagtcttcaccatacctgaggggaatgtgctgtgatctccattgtacaggtgaggaaactgaggctgcgagagcttagtggctatgggcaagtcacgcagctcaagtataacagctcagctcatctctgagcccagggccatttccatctctccactctgagccccatttctgtatctccagccctggccctggagggtgaaccctgtatgatgccacacccagcctctgagctgagatgccactgcctcctgggcaccaatcacacacctgtctccaggtgcatgtgtgggccagacacagcgtgtgccaagcacctgctgcaggctggcaccggcacccacattagctgtaaagctcacgatggcccaggcggtgacagtccctggttttgcagacagggaaactgaggctcaaagagagagaaggacaacctacagtcccacagctcggaagcacagcatgacagaccaacccaggcgtgtgccacagagctttagtctcctagcatgttctagaaaagtgctccatggccaaacttcttggggaaaatgccaccatgctgtctagaaaaggcccggagaagttccgcagtggagagacaggtttaactgtgctgggcatgccatccatccctcacacttctccacccggaattcttttttttgccaaagacctatcagaagtagagatatttgggaaacggagccagatgccatgctgagggctggggttggtcccttgaaaggacacctggctgtgctcacagaggtcctctcctaccaatgctgaagacccttgctgggtgacagaggcagcccgggtggcttcgcagggatggtcctgggatttcctgagcactctctggggacaaagctctatacttggagagtgcaggggaagcccagggcccagcagggtggcagctgcctggtaaacggggatgcaccgtggctcacgcggctgtcgatacaggcagaacggaggcctgagagctcctggactgatgagcactgtggctggggacagaattgggaggggtcaaaagactggtctttctgcaataagcgagagggctgaacctaagattagtgtgattggactcaggagctggggttggggcaggaatgcttatgagcaggacactgttgggggccagccaggagccccctttgctgctgggagttacccagagagcagggaaggctacagagttcacacaggcagaaggcagaggccctgcctagggctccgggagggtctcttctgggcatctgattctgaaatctcagttctatcacaagaagccagtgttaaatttctcttcttatagtggctcagagggggtcagcatggggcctgaggttacacagcacatcagcaggggagggtcaggtggttggggtggggctgggtctcctgatgtccaaacacttacagaaagccacagccccttggcaatgtgcctgggtcgggcaggctagagcttgagtcctgagaagttgggggtccctcggtaagtccttcacctccctgggggtcctgtttcctcatctgtaaagcaggcataagacagcctccctgggcaggctgtgtgaggactaaagctgttaacacaggtgagcggacgacacagtgccccccggtcgcaagcaaaacagacagtgatgccgaaagtgagcgttatctataagaaccctgctgcctgggcaccccaagggagctctggagagccagcctggcctcccctacctgacctcacaggaagaaagggacgcacacaggtaggaaagcaaagaaaccctgagaaagaggaggagacggggcggggcccaggacgggatccttgcccgctgcctctgagtttgtgggaagggagggaaaaggttggtgctgctatccttttacgatgctttgaaacaccgtctggatgaagggaaattaaatatcgcagcttttaactggagccacaccgaaaacacaaccttgcagtaaataaaaagacgatttaccaccgtgacactttcatttcacaaaactccctgtgtgccttgtctgtaattattccctcccggtccccggcctctggcccgactgtattacctgcctctggggatggggaggtggctgcggagcctccaggggtgggagcagccccgttggagaggcaggaggggtctgaacatggttcattatgattgagattaaactgaaaaatcaatttttaattgaatgtattcttcaaacagaccctgttgcccacggctgagcactaatggaatttccatcctaagccgccccttctccttgacgagccctccccagcctgctgaccccagcaggactcaccaggccagcagatctgcccctactggggctgcaacgctgcaactaaactccgccagcggggcacggtggcgggaggccactcgtgggtgtgtggaggtggggaggggctggatggtggagagtctgtcttctccacgtagactggctggccagctggggggtgccgggggtgcacctgggctcctctgaacaggccgagggctgctgcttcttgacccagtctggggctcttacgaagttgttgaaagatgggtctgggcttctaggcacaggggcagggacacagcccccaaggtcctctggttcccaagagacttttctaccaagagccatgttcaaggatggggggagaaccaggcccctgggagtaatgccccccataaccctgaagaccacggcctcccacccatgcacgtggccctgcctggcatcccactgagtccaggtcccaggactagaagacgaagagggaggcccaggacagggacatcctggtgcacggtgggctgctgtgtgaaggatgctggtccctgcacatctgcttcccatctgtaaaggggactcacagcaggctgcaagggctgggctaacagtaagaagggtgggaccacctgcctgccataccttggaccccacaagaaggggggtccctgtgtctgtgttttgggcagccttgcatctgaccgtggcgactagcactgaccggatcttggctgtgccagctcgcccgagtccaccccgttctctgcccaccctgcctctgtccttacaggccccctggagagttccccaagcctgttcctgggggacctggatattctggggacagttctgtggatggtgctgtccttgttggtggagcggggggtgggggggggttctataaatccatctcaggcatttctccttctccaagccagctccacctctgaccctcttttcctccactccctgctgcccccacagctcagaagccaacccacccacagcgtgggggtctcctcccaggctcgccactaccctgtgcagagcagttccttgatgaggctgggccttggccaccagaatcggggttctccccaccagggacacctctgctctggccacaggtgacccccttcgctcggcaccaacgccacgtgcaggagctccctagggacaggaacggggtaggggaccgtcgtcctccagcacaggcccccacacctggaagccactctgcatctgaggctgggcatgttttgggttggaaggtgggtggtgccctcggagcccctcctgcaggaagcactgactcatgaagaccccctccattttcagtcggtgaggacccccgacctgcagtgcctgggctcaagccaggacaccccagtggagggtgctcttcacggccacccctgttcctatttaactgcaggccaggacggacacccccatccttccactgaagggtggccacgaagggggacagacctgcttggccggtgcctggatggtaacaggcccccgtgcccagctctgcccgtgacaccctccagaggaggacacatctaagccacaggcccggcactggcatcgaggggtccagagatctccctgcagaggatgtcgtgtgtgggtggagggatgcgctgacctggccagagaggggggcctgcctccccctgcctctgagccaggccaggccctccaagccgtcctggcatcagtgggtggccaatgggcctgctctcgaggcaggatccgtgaggcctgaagaattgtcccgctctacccccgccccatggctgccttgtttaaaaatgtgccaagattttgcaggacggccacggagggtggggtgggcagagtaggcgggagacgcctaccacagaggcgtcacatgacccccagcttcccaaggtccctccccaagcctcctagctgcctcctgcaggcctcactcagaagctctttcctggtgtggggcaggtccaagtctagatgtttctagaagctcaagcatgctctgcgccccactgctggggcctgggtgagaggagttggtgggtggagggggcagggctcatgccgcagacctgaagccaagcccagggttgagccacaggaggaggaagaagcacccctctcccggccctgggaccacggttccaatcctgcctatgtccccgaacgccgagtgcctcctgaaggccaatgaacctctctgggtttctgtttcctagtcctaaactgaggactaggtgccccccactcgggcacaggaaggcagagctcaggtgccaaagaccagcctgaagtgtagatgtgtcagagctgagggcccgaggcaaacgccctcccttcacagatgtctcctggcccacaaaaggggcagacgggccgctgcctacccacctccgagctgtcaccaggttccgagtccaaaggagacgagcgcacctgtgctcccacacgctggttcccacctgagccagggaaggagaatccacaatgatgcctcgaggctctcagcagggactggcactgaatcgcagcaaggtgggggcgggacagggtgtgcggggtccttagtcgctgcctgtcctaggagatcaggggaaactgagaaactgcccagaaaaacagctcaggaagcccagagcccgagtttgggcacagattctgtcccatcatcgagctcagccaggacccccaacacaggagcctgcgcacgtcctatccgagtgtgcacctgcgtctcctggggtcttgcagagattctgactcagtggtatgggatgggctgagtgtatttcaaataagttcccgatgtgcgtggcggttctgaaacgtggccgcaccctgaaattgccttggaagctttaaaacatactggtgcctgggtgccctccctggagagggtctgaggccactggcctggggcgaagtctggccacagggactttaaaggctcctgtggtgattccaatgtgcaaccgagtttgggaagcacctgctctccgtgttctccggagccagcccacaggccagcccagtcggctctgagagggggccccgccccaccgccctggccttccttctgggggcgcagaggcctgctgagcactggccccgcatgtggtggcagcagggaggaaatggggcattcgccgctctgtggttgtgttttttctgccaccaccacaggcaaggcgttcggcaaagtgagtgcatagttcccactcagcacctggacccactgacacgtggatccatgcggcccacacgggggctctcagccgggcgacggtgccctgcaggggacatttgatgactgctggggacagggtaggtcagcgtctccaacctttttggtaccagggactggtttcatggaagacaatttttccaaaggccgccgggggcaggggggtggttggggagggatggttttggaatgaaactgttccacttcagatcatcaggcattagattctcataaagagcatgcaacctggatcccttgcacgtgcagttcacacgtgaactgtgcccctttgagaatctaatgccgctgctgatctgacaggaggtggagctcaggtggtcacggcagcgatgaagagcggatatgaatacagacgaagcttcactcctctgcccgctgctcacctcctgctgtgcgccccagttcccaccaagccatggaggggttgaagacccctgacgtaggttgtcacaacgtggggtgtccctagcatcgaatgcagggaggccagagatgctgctccacctcctacagacgcccatcagagtctgacccagcctggcagtagtgccctgggccaaatgacaggagggagagcttccccaggggccggcaggcccccgtttcaccactgcattagaccgagtctgcaagagggtacgtgactccatcctaaatgggtgttgcttggacttgaactcaagacctgggtttagtcttagccctgttctttccctctctgaattgtcaggttcaatgttaagggcctggaagaaccctacatgccatcctggttccaggcaaagccagtcggttcccaggtgtgtgcaaagcagccagacaagccttgtgcctcactggggagcagctgaggggctggtctgtgtgtgaccagctgccatctgcgagtccagccccacctggctctggagcagagctggtgcctgcccagggcccagaaaagcttctccatgggggcctgggcctgcagcctgctggtcacgtgggtctgctgctgggaggtcctgcagaagctggggaagatggtgggtctcctctctgcaggctcaacctcaccatgaggagggggcagaggcctgaggagggcgggtgcccctgctgtgagcccctgggcagggtgtctggcagctccttggctgccccctttggctttagcaaaacatgatcaaaacgggccccctgcctgcctcctggacacacccaggggtgagatcctttactttggatcttacagggaacaggggacaaaataagaaactgcaccagcctccgggtgtcccggggtcagcccccggtgccaggttcccagcctgctgtgctgctgtctggacaccagagccaggaccctccaattccaaggctgctcccttgccctcccgtccgtgtcgtcctcagagatggcacggcccaagtcaggaggacactgtggtcacaggaggcgctggccatgtctggccttctggaggaggcaggaaatccattcagtgcccacctctgcaggtggccgggaggacagcttcagttcaccagccctacgcagcccattttacagaagcagaaacccagatgtagagaagataattaactagggaacatcagagttggggtttgagcccaaagcctggaagaggctgtaaaggcagtgaggccgccagccttcccccaacccctccggagcctggcccatgctgtgcgccagaagaggcctggggagttccctgctgccctgagaggcaggccctggtccagagatcgggaggatctcattggggagggggggggctcaccttctggtaagaggatcctgggggccatggctgtcccctgcccttggcaaagcccaaagcaggtagttggcaagaccccaaaaggcagagcacgtggagcccaatcagccttgcacacccctggttctgggctggccaagggccttgtccgccacccacaagtgtgtccaggcaggctctgcgcccctggtgcccagtacctggccagggctgccggtgggcgacgaggcagtagctggtgcaagctttgccaagcgccttcgatccagcctctctctcatgctaatgactgtcaacatgaaacagaggctgtgaaggggaagaaaattactccctgaaaaggaattgactgatccccatcatttctcaaggaatcactgacctgtgaatatttcattacccaaaatgctgcaccatccatccagagccgccgctgccgtggggccccggggggagggcggatgtacagggccaggctctggcctgtgaccaagatttcctcaccgtgggaccccagggtgcgtgcggccctaaagacccagagacaggtgtctggcagacaggaacacggtagcctctctaggttttgggagcggtcatggctaacactccttgcagctgtgttctgtgcctggagtctccattctggttggaggactggggtcccgtttcccacccacagtcccttctccagcctcccaaggtcccttcccaagcctctcggctgcctcctgcaggcctcactcagaaactctttcctggcttggggcgggtccaagtctagatgtttctagaagctcaaacatgccctgtgccccactgctggggcctgggtgacagaagttggggggtggaaggggcagggctcatgccacagcctgaagccaaacccaggtttgagccacaggaggagggagaagcaccccacacccccccagaccatggttccaatcctgcctctgtccccggccactgagtgcctcccgaaggccactgaacttctctgggtatccgcttcctagtcttcaactgaggctaacagtagttggggccaccttacaggttgttgagaataaactaagaccaagatctaatctcagtgcccgacatgaggcagttgcttcctggaagtgatgagagttgggcgactctatcccagaagcacaggccacagagtctgaggacgcaggggagggaggccgaccccgccggggctccctgcagcctccgagggcctctgcgggcctggctggggtaggctaaggccaaagtccccagaggatgggaaaggctgagaccaccctcgctggcactgatcaggtcctgagtttgtaaggtcatgggggatggagggggacagcctggggctttctccaggaacttcaaggggctggaataattcattcaagaaacgctaaccataaaaccctcatgctgttctgggcttggactgggtgggattcaaacactcagcctgcagctcccaccactgacgaacagcgcactctaaagcttaagaagcacaaggagatcctccagggcatggaggctcccgcagcacccaggctgggacccccgctgcctgccaggaaaatgcgacgtctgtgctattattgccggggttacaccagggatggtgtttccaaattagcaaaggcctgggaaggtggcagggcatccatctggggcttagtagagcgtgggaggcagcatctcgggacccctccctggcccggtgcagccacggggagcccagatgcaggcagtggggggagtgggggcacgggggaggacaaaggggggcttggctcaggcccagccccggcccctcctggtggctctccccactcgttggattggaacacgggcattgctgtcctgggggaggagcagggctggacacgagagtggacctggcctcagtgagaaggactttggtgggctgtggggaggagcttcaggctgtgaagtgggtggggcagtgggaagtgtgcctgggggggtccgtggacgattcctccttcgggactgcttgaccactgccttccccgccagctggaccgtccccacacactgcagaaggttgggggtggcctaggggctcatgcccgcccgctcaggccttctctcactttgtcggacccaagaccctgggatgtcgagtggggtcagtaaacggacctgcaggtcctgggaggacagggcagggcggctgctgggcatcgccatgagctgagcttccactgagcatctctgagtgccagggtgaggggacagagatggctgccagcctcctcctctggggcctggagacaggagggggacaggtgttataataagcagtgacagtggctgcgctgaggactcaggctaagtgccagggtggggatggggatgggggctgagggtggggatggggatgggggtgggggtgggggatggggatgggggttgagggtggggggtgggggtgggggatggggatgggggttgagggtgggggtttggggtggatctagttggaggcagacaaggagggactctcaggtatccacaggggaggggcaaccaggagctgcccttgaggtcaggacaagagggtggtgggcagcggtgggcggcagctgtgggccacgacctagagcagcagccacgtcccaggagactgaggccctcaaggcacaaagcctcgtggggggtcctggctggggcccaggccactctgcttgggtaggacgctctgggtcaaggggcagagtggctgctgtgggcctgggacacgcagacagtagaggcctggccgttctctgggctctgcaggcggccaaccccctaactcagctccatccgcaacccccataccctgttccccagcccaggaggttccttcagtgcctcaacctcaccctggtcccgcctgcccatcactcaagataggaggcagctgaactgccggacactctacaggtggccgcgctggctcaacttctttgagaaccaggggagacaatgggaggtgcagggccaccagagctgtcactgaagtaggggatacctgaccacctctgggggcaaggccaggcctgccaggggcaggggcaacagattcacctcccatctcctcctttccccagcaaccccacacctgccccacattcttagccagagaagaggcaggtagggatgggcacttccgagaaaagaggggggcagggaactgcagaggccacagggtgcctctgactggccatggggcctcaggggggtcacctcagctcgagcctcagtgtccccgtgtgcgcaatgggaggacgagggcttgctcatgcctagcgccgcctgcgagggagcctcagttgggcaacgagcctggcttgctgcctgccacagagggctgggcagtgctggtggccgccccgctgctgtgcggctctcaccagggcaaggccacctccccagtccacgctccgcaagtgctcagcacacacacatccctccaccatgctgggccctggactctcagaaccacaataaatgcagctcttggcgcagattctgggtttgatcctcgcgctgctccccctactcggggcaagcaacaaagccggcatcagaccctgcgtgctgaccaccccctgccctgggagggctgaggggaacacaagagaagaaaaagacacacagtccagggggagaagcgaaatccagtgccggggctgaagggaccctgggtcagctgccccacgggacgcgtggtcccgacggctctgggtccagacacgttcggtgtcacgggaaggaggggaaggggcttcccggcagagagcaaaggcacggggctgggaggggacctgcagggggaggaggggaggcgaggatgggaggggacctgcagggggaggaggggaggtgaggatgggaggggacctgcagggggaggaggggaggcgatgggaggggacctgcagggggaggaggggaggcgatgggaggggacctgcagggggaggaggggaggcgaggatgggaggggacctgcagggggaggaggggaggcaatgggaggggacctgcagggggaggaggggaggcgagggtgggaggggacctgcagggggaggaggggaggcgatgggaggggacctgcagggggaggaggggaggcgatgggaggggacctgcagggggaggaggggaggcgaggatgggaggggacctgcaaggggaggaggggaggcgatgggaggggacctgcagggggaggaggggaggcgagggtgggaggggacctgcagggggaggaggggaggcgatgggaggggacctgcagggggaggaggggaggcgaggatgggaggggacctacagagggaggcgcggatgggaggtgcagggggagctcccacatcccccatccccaaggccccctgtcccgcaggggagaacgctaagaaatggggaagcaggaggggtgatgggaggctgggaggcctcagggctccccccacccaccagtcccaatacctgatggactagagccagtctcaactgggagcctgagactgtgcataagtgggcgagtggggtcccaggagaggggccagggttggggagccccagagggctctgtccctgcagggtctcaagccatgtccaagcccagctgctctctagcacctggggcctggccacccccggggcgagacttcggggcacctcccccagcccatcctcagtgaagctgagaggcggctgcttcgggtcagcaaacgtggacactgccttccagagaaatcaaagcactgtgccagccgaggcccagagagtcataggagcagtgcgggccgcagccgaggcaaggaagcaacctccttaggggggactagggtgggggggtatccctttccagctgggccgggggtcaccccgaacttgggatgagggcactcattctgtgagcttcttcaccccgcttaacgccccacaagcgccctgaaccctctgtgcaagtctgtaagctgcacaggcgagcagagactctgggagctgggagaggtggagggtccccagaaggagacggaaaaggggaaagagagggaaagaacaatgtcacagccagcgagagggccagagcagggcagacacagctgtggggggcaccgaagcagtatccacataacaaaggaggcagggccagaggcgaagacagggccgagaggcagagtggcttgggcacaggtgccagacttgccccatcctcccacaccaggaacacggcgccggcctccgggacttcgccgcattgcccattgctttcttgcgggtgtttacaggctgccagcactcctgtgctgggggtgtttccagcccttctctggtgaggcaggggaggtctggaggtggctgcggtcgggtgggcccgctgtccagataccccgccccaccctactccctaagtgcagggcaggacatctgcccgctggggctgccctatttcctctgtccccgtcctgcccctcaccaactgagcagctcacttttcctgcctcaccctggtccagctgtgtctgcccccgacccttggccctgttctggggtccctcccattttgcagaactgctgacccccagatccttggctgggggtgggtggcggacacagcaggcaacgaccacctgtgatcaccccatttccctgcaccctgtgctggccaagatgtgcagagggtgtggccagggaggtaaacagcacaggccttctagaaggtgctgaaggaacttcatgcctcattgagagaatttccaaattccctctactagaaaattctctccacgagaagcccatttttggggctggtggggtgataacaggtgtgagcccagctaagcctcggtgtcagggctggggacttcagaatgacaggagtggctaaagctgacagggccctgggaaccagggtgggccaggcttcccgtttatcagagcccagagaggctaaagggcttgcccaaggacacacagcactgagaacaccaagctcccagatttcccatccggctttttctttttccttcctcccaatccttacttgctgcacggacattatacacacaggaaaagaaaccaggaaagaatcacgtgtaaccaatcccaccacctgcacctgggcacctgacttcccacctcctcctcccacctttggcaatgggctttctacccggctgggaccatggatgttgatatttggcacctgtggttgcagccctctcctgccacatgcccacacaggcctgagccccggctgcccatggtggtctccagcccccatgatccattccaccctcaagtgacaaccgcagaccctactgtcttgaggggatgggaggggcgggcccagtccggctcccacggcagccagggagatggttaaaacagcacacactggaccgtgcctctctgctgcctgaaacctctaatgatttcccttcactctgaagaaatgtaccctcctgaccccggcccccaaggctctgctggtcccctccctccctccctccctgtccagtcccgccccacctggctggctccagccaccagagtctgtgttcagttcttcgaacacgctaagctccatggcctcagggccctcgtacatgcccttccctgtacccacaatgctgttccctcagtctttccttgcccagctccttctgtttcaaagctgccccttcagagatgtcctccctggccaccctgcctgaagtgggttctgctgttagccctctgtctcggggaccccgcagactgtgagcctgtgaggaccaagacctcatctctctttctctgctgcaccgaggtgctgtcacgatgcccggcacatagcaggtgttcaataaaggagtgagtgcctaagtggacgagtggggaagggtggatggagggaggaagtcgggcgcctgtgctgaagggctcagaacctgactggagaggtctggctgagggcagacagaatgaaggacgctggctggctgcccagccgggcatgagccaggacgagccagtatttggctgggtctcgccctgcccggtccccacgtggccgggagactggcgtgggttcagatcagccgcaccaaagacctcaggccttggagctgctggcccctgccccgttggctggttcctgcttctctgaggaaggggaggctgtgggcaggaggtgccactgaggagtctgggcctcccccaaaccctctactgagcaagtgcgaaccctcccaggcacctgcacaggtgcacatgcacaggtgggcaggacatccccacctccctccctgctcttccacaggccccggggtcctgcgcctcccaggacacctcagccctcgtcaggtggcgctggcagcccagcctcggcgtctgaggaaggggtggcagccgtgccaggcatccaaagggtgggtgggggagggggcagtgggcagccgtgaatggcggcctccctgccacggcacgtgagctcggcccagcggttcccggggcagcagcagctcccgcctaagtactatgttgaagtggccagctagtgccgcgtccctccccgcccggggctctgtgccttggtgaggttttattgtgaacacagagcccacaaggtgggggtgtggctgccagggcgctgctcagaacccgccccacacccccaagccttgacagtacccccagcaatcactcagactcctcaacactttcccctccccgctcctcgggcaaccccaactcaacagtggagctgggcactgcccgctctcgggcaggaagccagtgggcagggaggtccggggcggcaggctcccagctccatcagacggatacctcggagcggagccagcatgaaatattcatgcagtaaatggtgcaattttgtctgcattcagccgacttcatgtatatttcagagtattatgaaatggtaatgctgtacggcagaggtggtgcagcccggagggccacagctgggggcaggggggtctcagggtgaagacgaagtgggtggggagaaggaccctgtcccttaggggcacggagatgagaacgaccaactctctgaccagggtgggcaagagaatggaggtgccagcacctccaagacgggggaggcaaggactggagggtgggtggtgggagtccccaagagtgccacagcctggcaggaggcagcccacccctgcacccccaggttggaggcaccccagacgcactcccctcccgatggtggctgggggtagagctgttcccacccgcacctctcctctctgactgccacggggctcgggtgtcaggccaaagccttggtgccaattcagcatcgctgcctcccaggtgcgtagcagcagggcctctcggggaggccccaagtgcagaacctccctggcccctccaggtgggcatcattcagcggcctcgtccctcggccaggcctagccatcccctggtgcctgagtccaatctggctgttgttctggggactgacacacttgggggtgacggggaaaaggtcttgggaaggaggatgcgcccgcctcatttgctacgctctgaactttctgggggtcttggatgcagagagatctggcatccaagagaggtcacccagagagaaactgtccttcagcctctgctgtccaggactcaggtttgggggttccatggtggccaccccagtcctccattcttcatccacccaggcaccaaccatggcttctctggaccagcctcccggggcctacaccagaggaagagcccctggttgggagggtccccattcccagggacagtgaccccagaggcctggcagccccacacactgcgggggcaggggagaacctcgcctgagctgcttgggctgggaactgggtttccttggctgccctcacccctcttccacgtctccagttgggcaggcctagggtccccatggtcagctagaccagggatacgcacaattcagcctttgggccaaatctggcccgctgcttctctatgtaaataaagttttattggaacctggccacaccccctcactcacatattgtctccggctgtgctcgccctaccgcatcactgaggagttgcagcagaggctgtgtggcccggagagactagcccaggtgctgtctggcctcgtacggactgggctggctggccggcccctgagctggacagcaggacagggtgagcctggcttgctggagtccttggcttctgctgatgggaactggcccttctcaggagtcccgggaggaaacggcatgctggcaggcgcggggactctgtgcccttggctggctgtgtttgccccgctgtggtggctgggtgagaatgaatttcatccctggcaagctacagagccacactgtctggtctgcagcctccctggccagagcagcagcccctgcgctctcctcagccgctgctgtgggccagggaggcggtggaggtggccgaagggcaggggcctctggagggcccccagagactcagagaaacccctccggtgtcctcgtcctgacacctccctgctctctcctttgcgtgtctcactttgggctctgctcttactccccgtctcccaccccaggggcccccactctgtcctcacgctccctctgcttttgccctggcctggcgtccatcagcacccaggcactgtccactctgcagctggccctgtggcctagccaagagcccacagttgtccatcccctctgcggagagcccagctgccgtccatgcaccccttccacagacactgaccacaaagcttctccccgtaaggccccggaatctgatcaggaccctccgagggaacctgccaagaacacagatgcctggcttccccctgggtcaccaaatctagcccacagcgagaactggccggtgccacttactgatgtgcccaagggactcagcgtggtagagtatgaggacccgggggtgaggttgtacaggggccgggtttccctaagtccctaaaagctgagatgccctgggccctgagcacagctcctctccttgtcccaggagagccagctctgccgggggacagaggccagggcatcaacagtccctcccaggcccacgctgtccccaccaccacctcttaaggctggcagtgccatgttccacccagctcggcacatgctggcccagatgaccaaggacaccccactccctggctggccagccccagatgaacaatgagtgctgcttatggtcaccgcacgtctggagacgcagcacaggggaggcgactgcaagctaggatggggctagacggccctggggagctgcctctgctgctgagaacgaccgagctgtatcacccgctccaactcctacgctgaagtcctaacccctagtaccttagaatgtggctgtgcgtggagacgggacctttaaagaggtgattacattacactggggtcattagggtgggccctaatccaacatgactagcatccttacaagaagaggcgattaggacatagacacacacagacagacgaccatgtgaggacacagggcaacgacagccatccacagccaaggaagagaggcctccaacagaaccaaccctgcccacacctggacctcaaactcccagccttcagaactgcgcgaggagaaacgcctgttgtttatgccacctggtctgtggcagaccaatacggctacttactagtcggctggccctgggcaggcttcctatgccctctgtgcctcagtttcctctactgtagaatgggatagcaatgtgcccacctcttgggctgtggtgagccggttaagatgtgaagagcctggagcaggctgagcaggggcactgcaaacctgctcctgttcttacacttccccacgactcagaggccggggacactgggcaccttgcttgcagctctcacgccagcttactcctaaacaccccaaccagagcccctacaaacacagccaaacggagcagaggcaggcagggtctgctcccgacagcccttgctaaggacgcccgaccaaggctggcaaggaaggtggctagggctcagagctcactgttttctgggaggagaaattaaaacataaatgaaaaagggctccggggctgagcagggcatggaggtggccaggacaggagcccagctgcaggtacagccccaatttatgtgatttttagggacctggaaagggacctggctcagcccacgtggcagtcacttctctaacttcctaactgcggccccaggatggctgctgggactcccagagatggactctcacggcttccaggggtgcaaaggaaggacagtgtggagtgtgctgtaagccccaaccgacactgcttgagcacctgctgtatactaagcgctttcatacagtgaaggcgaggctgcaggccatgtccagctcacagacagagacaccaaggccacccaggcaccaaggtgatgcagctaccgaggccacacgagaagcaagagggcatctctgtggcaggtgggtagtgggagttagtgtgagttggggagcggagacccaaagagctgtgctgggtggccagggaggctctgactcaatgcccagcaccaggtgagctgacctgggggtgcccatgtgtccacttatgggagaccaggaggcagaggcaggttgggatgagagtcctgggggtagagctggcccgggcggttcctcctcacagattctatagccggagatggagatggctcaggggcatgcctgcctgcggccctggctctccaagagctctgagaccaatgcccccggcttagcccaagccgcacaggaaagccatcctgtggaccaagtctgggcacacagagagggctggactccacacgcatctgtggcaggctcctggagactcctggaacacccctgcattctcccttcattctcaagcaatattcctttgggaaaatgctcacctggtctcagctgaatccaggaaattgattgccacccactcacacactcagagttcaactggggtggtagggacacatgcacaggaccgtgcccacgcctgggctgcatgcccgcagctgggggacacacacacagagtgacgtgcacccatcacttacacacacacattggtcacacacatgtccacactaaatcatttgctcacaaccactcacacacacactacctccacactcacaccctacagctgctgaggagggtgaggacaggtcgctactcccacctccctcataggatgagctgcaaaacggctcagaggcttcagcgagggtgcatgcgtgtccgccgagtgttccagcgtcccgggacagttctccccagcaccgttgatacagcccccactgccctctgaagtgcagacaaaacggagggcagctctgctcagggcctccctggccccaggaagggccaacaggcagcaagggctgccttccccaggaacgctccgctcgagtagtaagtgactgcctagctccggccccgggggattctcctgagatctgtgagtagatgaagctggggattagcagacatagctccaggccgggaggaaaaatccatgtgtgattcatgatgccctcccagacgtggggcgatgcaggtggcctggagccagggctgacgcctaggaccccaacatttctctgcacccaaggggtggacctgggggccatgcaggcactaaggcaaggcacgagcgtgtgagcgtgcagcagacagcatggcagtgtggtcccacctcaagctgcagggcagagcacgagagacccaacgtggtctctggatggggtctcaattatcctgtacggccaaggcctaagttctaagagctgggcagtcccccgtatgtggggcggtcacaagcctgcagctgtccctcctgctgtatatccatcccgagctcaccctggagcaggcctgggttcccggggcacccccatatcccacctgcccactctcaaacaactcttaggccagaaaactctctgagaagggacagcaggacttgggattcccccattcattcattcattcattcattcatttttttcttaataaacatcttggcgagcgtagtggctcatgcctgtaattccagcacttagggaggccaaggtgagtggatcatttgaggtcaggagttcgagaccagcctggtcaacatggtgaaaccttgtctctactagaaatacaaagattagccaggcatggtgacgcacacctgtaatcccaactacttaggaggctgaggcaggagaatcacttgaacccaggaggcagaggttgcaatgagctgagatcacaccattgtactccagtctcggcaacaagagcgagactccatctcaaaaaaaaaaaaaaaaacaaaaaagtctcgtgggctgggcacagtgctaactgctagcaacacccaggcaaggaagatgtctatctggtttttgcccaccaggaatttggaggttagaaacatagcccctctgcagataatctgtagcaggacagaaaacaaagcctggttatggtggggtcatccagcctgaggcactcaggggaggctccctggaggaggtggcccagctaaagccttgaaggatgcacaagagtgagtgagccaaggaaggggccggcacgagtcaagtcgcagagcccaggggacaggtcaggttggagaagggatgctgagaggccccatgaagcccgtcctctgctgccaatgaacccttcatggaggcctggaagcaccgcatggctccagcacacaccccgatcccatcacttccgtctccgcataccagctggggatgctgctccaggaagtgacctcaccttttaaatacaatgcgtcttcctgcaacttaaccccctcgggggtgtgtggaggcccggaagctggcctgcctgctcttgcagctggtggttgaagtgcccttgctcttccggttatggctcttccgttttttttttgtgtgtgtgtttttttgagacagggtctcactctgtcacccaggctggagtgcagtggcgcgatcttgtttcactgcaacctccgcctcccgggttcaagcgattctcctgcctcagcctcctgagtagatgggactacaggcgcataccatcacacccggctaatttttgtattttcctagagacggggtttcaccatgttggccaggctggtctcaaactcctgacctcttgatccgcctgcctcagcctcccaaaatgctgggattacaggtatgagccaccgtgcctggccacacccacactctgtggggaccagggcctcctgccacaatcaacccacaacagtcgaaggaggctatgaggccccagcgggacttttgggggacagggatgggaggaaattcaggactagacagattacaaaaccgctcacagacttctgcccccagctgcccctgctgagaattgggagccagaaaaaggaggccaaatctcagggtaatgttcatgctccttgtaacctctggtcccattaaactagcagcacaatcccagctttaccttgcagagccagacataatggggcattagaagggaattgaatttccctttaattacaatggcccacagacattgtttaatttgtaatctgggagttaatgtggttttctcctcttgcagtcatggggccgcctgcacacacatgttctcattcacccggacggagcatggggcccaccctgcaaggtgagacgtcggacaaggccgcccccagcccggtgagtggagtgccgcgcccagccctgcctctctcctgcctccagccaggcccaccacacagaggacgtcagtgtggctgtcacatgtcacatggagcacacatgcatggagccatcctaataggcaggcaggagcataatttttcctctaattacatattcagcacttctgagaaaatgagattttagtaattcaattggactgagaagcggggctataataaaatggaatttgtaacaatcgcgcagttaaattagttaaatggagaggaaggagctgtggaaaattgacccctcgatctcctaaggactaatcagacatttgaactgagctgtgctaacaaagccctcgggtgttgtgggtggtgtgggcgggcgggggtctcccgcggcaggtgaaggaggggacggcggagagagcagggctgggagagccgggaggggtagaggacagctcagggcttggggaagtaggtgctggaatggaaaaagccagtggcacggcttctgatcaagcggttctcaaactgcagttttcagaacatcctccagtgccacctggagagggacaaagtcacggaggagaccgaggtctgtgacatgcagctctcgggtgctcctgagcacagacacgccagggctgtctgggggagagagggtgacggcgggaccaaaactgtgcccacctcactgccaagctgaaacagagtggttcaagctgggggagaaaagcaacttctggccagggtgtggccactgctcccccatctcacctgggagcatccggccccaggaccctagccgggtccctctctggccttggccagctccctccttggggccgggcagcacactcggctgaacaccaagtgtcacagaggaggcaaccgctcctgccccgcctggggaaagccgcaggcccggggcctcacggcctcagtgttctgagggtgtcaagaggggaggtgtggaccccaagcctttggagaaactgagagatcccggaaacaagactccagggatgctcttcaggctgtggtggggcagagtggagaggccagggcatccgaatgtccttctgacgctgccccagacccttctggtttgcagagatcctgtcattcaggagaacattcttccccagaaaccctggcaacataaaaagtcagggaagtcccagagctggagggcaggatgggaaccgggaaggttgttgccacctggaccagactggtgctttcctcaccctgcccacccagcactgggtgcagagctgcctgggtggggaaggcctagagggatgccccccacccgcccgcaccccacttgcttccctcctggctgatgcggaagctttgccaacagggtgccccacctccctcaggcacctgggaccgccagatgcagaacgggtctcctgcgttgagctcctccttgcccaggtgctgtgggtgtctctgggccagatggtgtccagacaggcctgctggagcccacccagcccaggcctcctgaactcttatgctgagccatgcaaacaggctggggccaattggagggtggggacccctgccccacagcctgaccatacagcacattctagaatatcagcagaagcagcttcctgctttcctctgcaggcaggcccacctccaccccacagctcagacagaggtgtgggctccaggaatccttctgtaccagggttcggaaaagggtgagatggggaagctcaaggtttgggatgggggagggaaagaatgggccaagaagatcccagagatcccaggcctctgggaggggtgggcatggctgcaccccaggttccccacctggcaggggcggtggcggtagcgcctgggcagaaaagtgcagctgctcttcaggagtccaaggttagggcatagtggggagctgggagaagccaacaggctaaggacttcctgtgggcagcaccgtgctgagctcgtggggtcatcccacttaaccctgaagacccccaagatacaggtgctggactgtccttggctgtgcagtccgcagcttgggtgcaggacaggggctctgcggcctggtgagagacgctcctgggggtgggcggcacttcaccccttcagtcttggggggaggtgttacataattaacaccttgggtgccttggcgcatggccagctgtgccagtgaaaacggtgccactggcccttggtgggaggcccagcgtcaggtgcggccacagcacggcggagcaaaacaaaagtgcacgcattcctcggttcatggaggtgagcccttctcttggtgagggcagtggaggtcccaagtgggaaggccgggggtccaggcaccctcctgggagcctcacccgcgtggtggctgccctgatgccccagaagctggtcttcccatgtgcctgggcagcgggctgggagggccagggggagccaaactgcagaaaatgcagtggccctagcaggcagaactcacccttaacttccctcgcccctcttctccctgcaccagaatcacccaagggacccagcgtttcactcatctttccacccttagtgccgggaagaaaatgaaccctcagaataacatctgctaaggaaagaccagaccacacgctcatctttctagagccaggaggaaggagcctctgacatggcccctgaacaaaagcagccgggccacacctaacaggcagggtgggagggggaggcatggggagcagccgggagggatgagaggcgggagacatgggctggtgtcctctgccctccagcatcttcctgcacagccctctgggctggcttccacctcccaggctgcggtgagccattcaaatatttatccttgtgtcatcttctgaaaggggagagaagagaaagagggagggaggaggaaaaaacccgagtttctcatttgaaagttaattagtctaattaggtctaattaagagcccccaacacaatgcagtgcacaaatgaagtgccggctcctcatttcctttggttctcattttagactgagctgggaaagcctgggaaggagggggtgcctggggaggccgcaggagggcacagcggggtcccatccctctgggggacaggtggcgggggcccctgggcagagctggcaggtgcacatcccgattcctccatgccagccatcccgggaggtgacgggatgaacttttaaatcccattctcagtgctctcctgttttctggctccggagccccctggagaaattctggcttcgccggccggggtccctggctcctttcgcaggtgcctcagacacgatcttcagacctgcacaagggcttggggtctatgtccaggacatgccccacccccaggttctggaagcttccagaagtcaggccaggtcacaggatcattaggggctgagtcctggtttgggggtcccgtgcctacctggatcaccccaaaggagggcagggcagcagcagataccatgagacgccctgagattgtgggcattctgcctgcagcagggctgggagccggtgacacgcggcggggttgctgaggacactgtgagccaaggccctgcagggcacccgcgtgcactggccggggagggatgtgtccacaggccccgggtttacacagagggaaactgaggcccagggagctggagtgagatgttgcacagatctgtacccggcgtgcggcagagttgtgattggaactaggtacaacagagggatacaaacctgggcttggcccacgcccacccctcctgttccccccccgggcaggtaagggcgaaccttggccccagacaaactggaggatgcaactccaagcaaacaccagtgtgggaggggctcctttccctcctgcaccccccagcgcagcctcccgtgggaggggagccttggcaggagctatgctcaggaaaggaggcccgggcagttgtggggagcccgccaggagctgtagccgccccgggctccaactcaggcagccgagactgagccatgcagcaatgggaatggccggaggggatgatgtctgaaccaagatcaaaagacttaagtaggctcagctctcagccacagatgaaggggagtccaagagccacccacggggagctgagatgggggaagggaatgagggggcttcggaagggtcccgagggagggcagagcctcagggaaggtgaaggcccaacaccccagcaccgagatccggaggaggagcccagcccctatgaacatgcacaggtcggaatgtaggcccttgaccctcaccatccacctggccgagggaagcccccaggccactcagagcccatccacccctcctgccagggctggccccagccaggtcagagtgcggatgccaggctgggctcagtgggagaatcgaaacaaagggaagttgccaataaactttttgggtgatgaaaattcaaaaacgggtttctgggatggttgcacaactgtgaattccttaaaagtcaccgaattgcacacctgccaaagagtgaattttacagtatgcaaattacacctcaataaagctgttaaaaataagaaggtgaacagaccagtggccatgcctccgggggcccagagacagcctcaaacaaaggaccatgaggaaatccagagagcccagctctctcaagacccccggcaaggcgggcacgtcacccccacgacagacgcgctcacaagggcaaccttctcagctactctgggccgcagttcttctcttctgtgaaatgggaagatcgatcatatcctggggctgctggaggctcaagtcagagacttccagacagtgccaggcacatggccaagaacaagcccaggtacagtgccaggcacagtgccaggctcggggagtgctaggcccctcttcccttgttctctccccagggtctccatcaggctctggggggccccttcttcccctccctctggggtctctatcaggctctgggggcccctccttctctccctctggggtctctatcaggctctacggtcctactgagcaccctccaaggaggccctggctgatgtcagggctgtgggtccatgggaccttggctctagtggggccgcataatcccccagcagcctcccatgggtcatggagtcctttcctggccatcacaggcttggcggggttgaggactccaatttacagatgagggcactcaagcctgtcttctggtctgtctctctcaccccgggctcactcacagccccggccgcagtctgcctgcccccgcagaggaagcgtgcttggtgggtcccctgcagtcccgccacccgtctagattcctcgctttaaattctccccatcagctgccctggggcctcttcaaccctggccctacctggggtccagggcaccccggagccggagcacggggcctggaggtgcccccgggaccctggaagctgcctctctgggatgctaggtcctctcagagctcatccgggaccctccaggggaagcacagaacctccaaaggctctatggatttccgaggagggggcaggacaaagatgggcctcccccaggtaaaagcccttcccttcacctccaaccacagagtggggggcagtgggggtccccggctggaccccagccccagggctgggtgaggggtgggtaactggggagggtggttggcactttatttacggggtcctgaaacagtggggccggctcagaggctaaggagcccagagggctctgatgccccgaccctcgttcgggaggtccatccctgagggccctgaccccgctgctgcctgacccctgaccggcagggccctaaagaggcaggtgcggcttgccatgggtgggtcccccactgggcagggaacctgcgaccagtgcctccaaagcatacttccaaccctaaattaaaataaatcccaccaccaactcatgaatagcacaattgcatggcacctgcctgagtatgggtttaaattgtgaattgaccaaatggaaatagtcaagataaactacacattttgtgaccttatcttagcaatttctcttcctgatgtcatagatccacagcctaagagaacagaagaggcccgtgcccaagggggttggccccacggccgccctatgtcctgtggccccctgaccctgccagccaggaggtgtcctcacccccactggtccatgaggaaactgaggctctgaggggagaggggtcactgagcaggtgtgggcggcctggcccgcttgtccacatccgctgatgaatgcactgaggtgggacagtgccaccttggacaggccagccgcacggggctgcggcctctctgcgggtggcccggcagacacagagccatggtctcctctgtcagccagtgtgtttgggaacatggcccatttgctggttcatcctcctagctcaccctgtcttcccgctgggcttacatgccgggtgcgccctcgcctggccctgggtcatgaaggcactgcagatgcatgcaggtagggcagagagcccacttggtactcacagtaccagatccgtagcaatgcagccgtggccccagacacacagccgtgatacatgcctgccacccttggaaacaaccagcaccccaaacacgcacactggctctcgccacactgccgctgagtggaggaccttccaaacagccccctggccctgctcagctctcaggaaagagcccagctgcacagggcggatccgtggggactgtgtgaatcccggtgtcatttcctacttgggatttgtaagagggacaaaggcagcactcacagccctgattcagacatgcaggggggtgcccacctctgcttgggcccagggcagtcagcaacccgggtttcactggaggggctgggtttttctttttcacacaccttaggcatcctgaactcagatgctggggtagcggtgaggattccatataggggaagggcagggaacacccctgggctgtgcggtgggcagtccctctcctcctcccctgctccttcacccactgcgggcaggacaggccctcaaactgctcccacaagacccctctaagagccagctaagatcacacaccccacccaggacccaggacccaggaccccgcctgcctccgccagggctgcaagccctcagtgcagagtccacaccctcccaccatgggaccctgcacactgcagccctcgagaaacaggaggcggcaccgagggccccacctggtgtggtcccgtggcatgaggcagccccaaaaggcaaatccacagaggctggcaggaaggccgcacacgggtgggctgggaggctgccagaggctgggtggggagaacgggaggtggctgccactgggcatggtattcttgttaagatggtgaaaatattcaggaactagaagtggcgatggctgcacaacgctgagaatatactgaaaaccacggaaccgtatacttcataagggtaaatgttacgatacgtaaagcccacagatacaaatcattaaaaggaaaggaaatgaagagaggaaagaaggaagaagagaaggaaagaaggaaaagaaggaaggagagaggaagaggagagagttaaaaaaggaggaaaagtgggaggaaagaaggagggaagggcaggaaggagagaaggaaggagaagagggaagggaaggaggaagaaaggaaacggaggaaggaaggaaggatggaaagcaggaaaggaggaggaaggaaggaaggaaggaggaaggagggaaggaaggaagggaggaggaaggaggaaggaaggggaaggaagggcagggtccggaagaggctgccttggctgcagtagggctcaggccagatgttcacggagaacaacaggttaacggtgtccagcttccaggagggccaagtgttcatggctggctggggtaccggctccggtcctgccaaacgggccagaggggagatagaggaaggagttggacctgagagtcccctgccaggggcctgcagcccagcctggagcctgagggagggctccagggccaggggagggaaggtgttttctccatcagggagccacggcctgggggctcttgagggctgggggggcaaggcctggtcagtgcaggctcaagcatcccatccaccacgcgtctgcaccgtcctgaagccagaaaccagctgttctacagggacccctccgtggtgtgtccgttaggcctcccaggtatacctctcccgctaaagcttccccatccacccctctctgtccctactgctgcccctgcccatacccctgttccggccgcccctggtctgtagctttctggcccctccttttctatcccagatgaactttccttacttgtaaatctgatcctcactccctgctcaaagaccttctgtggctccctattgcctactggaaaaagtcaaaatttctcagcctagagccccaaaacactcactccctcgcaccccgggtaccaggtgctccaggaacccccgtgaacccactcaaccctgtctttccacgtaaactgctgcctccgtgtggatggtcctgttcacagatccactgccacaggtccagaccccaaacacagagggcagagccccgctcctgagacacctgcctaggtctccggtggagataagccttattccttttagatctgagctgtccacttcagcagccactggccccatgtggctgtcgagcaattgaggtgggttgtgagtgaaaattatacagtggattttgaagattcagcatgaaaagagaatgccaaatatctcaatcatgtgtatattgattaaatgctgcaatgaaaacagtttggactgggttacacaaacacgtcattagcacgaatttcatctgcttccttttacttttgcagatgcggctgttaggaaacgtaacatcacccgtggcttcaccacgctgccatctgcggacagggctggtgtaggccagagactggccaacgttttctacgaggggccagagagcaaatatttagagctttgctggccatatggtctctgctgcaactgctcatttctgccgtcgccaggcaaaagctaacacagacaacacgtaaacaaatgagcgtggctgtgttccaataaaacttttaaaaaataaaaacagacagtgggacagatttgttccacagacccctgcactagatctctggtttccagacttttgaatcacactaattactaacatttaattactttttttttataaattaaaaaaaaaatagatcttgccactttgcccaggctggtctcaaactcttgggctctagtgatcctcccaactcaacctcccaaagtgctgggattacatgtgtgagctcaaactcttgggctcaagtgatcctcccaactcaacctcccaaagtgctgggatgacgggtgtgagccaccacacccagctgtaatatttaatttaaaaagggtggaggagggggaagatccattagaattaccaacctttggctgggtgcggtggctcacgcctgtgatcccagcacttcaggtggccaaggcaggtggatcacctgaggtcaggagagttcgagaccagcctggccaacatggtgaaatcctgtctgtacgaaaaatataaaaattagccaggggtggtggtgcacgcctgtaatcccagctactcgggaggctgaggcatgagaattgcctgaacccgggaggtggaggttgcagtgagccgacattacaccactgcactccagcctgggcgacagagtgagagtccgtctcaaaaaaaaaaaaaaaaaaaaagagaaaaagaaaaaaacgccaaccttttattttcccaaatgaggacatttaaaaaatgaacagcagatatcactatcacaaaaatgggcatttcaacacaaaaagtaaacatctttatgaaaaccatgactacattattctgattttgcccactttgccacaggtaggtgaaacctttgtcacagacacagcgtgttgttgcctggtgcaggagctgggaggggaccggtctgagtctggtctgaggcctgtggtcatgggagtttctcccaggccaccctgtccacgtccccctggtgctccccatgttctagagcagcgtgactccctgggcctccatctgatggcgattccaagggaggcggcttggggagccggagggtctgcgcttctagctggctctcctcactgcaggaccagagggagtatcagagccctagagttgctgtgtccaacagaaaagaatgttctagatcggccagtacgttaaccaggagacccatatgactatgggtcctggaaacgtggcttgtctcaacagagatattctgtttgtgtaaaatctacacccaatctcaaagacagtacagacacaagaatgttaacgatctctcatagtttatctcatcctgattattctgggggataagatttgagctatgctgggttaaacaaaatgtatgattgaaattcatctcatctgtttcttttcaccttttaaaaatggctaccagacgggtgaggtggctcatgcccgtaattccagcactttgggaggccgaggtgggtggatcacctgaggtcaggagtttgacaccagcctggccaacatggtgaaaccccatctctactaaaaatacaagaaattagccgggtgtggtggcgcacgcctgtaatcccagctacttgggaggctgaggcacgagaatcgcttgaacccaggaggcagaagttgcagtgagccgagattgcaccactgcagtccagcctgggagacagaacgagactgtcaaataaataaataaatacatacatacatacatacgtacatactactagaaaatgtaaacttccctgtgacaagcactgtatttccatttgacagcgttgctttggagcctttcacagagccagccagcctctgctgaattcttctggtgatggggaacttacacctcatgagacagctcatgctaaaggcattaacactggagacgcccttggaggtcgtcttcctactgccatcccaccctctagtcctgctagccctgtgctgcctggtggggagggcctattctctctaaggggcccacctgcagacttttgaagatgatcagctaagatcccagttaaatgcccctgatgcctttagctgatcttcccggtcaaccttccaaaacacacagtggcttggcagtgacggcacggcactggatgcgccagcgggtctaggtggctctgaccccatcccgtccgctcactgggtgatggggcagggggcctgggaggaaaatggtgagctggagccacccctggatctcagactttgctgattttaccccaggccttctcccaccgtgtcttgccatgcagctggagatggcttcattttttacatcatccacctatcggaatggactctccatgggtcattctgagaccctctccccacgctgagtacagagctttgcacacgccacgtgctgaagtggagccctgctgggggtggggggtgggggtgtcagcgacctcttagtcacccttgactccagggtcactggatcttctgtttccttttgcttcccctgaatttgttggtctagttccttgtgaagtcccatccgcttattagctacaccaggagacacagaggaaaacggcgagcgtctcagtcccaaatggggagaacagggcctctccccaggcctggtggtggggaccagggaaacctccagggtgaaaacacctggtagaaggtttcctggggcagggacgaagtgctcactatcacttagctgtcctctgccttgccctatggtcagtcccacacacacaggcacacacacaatgcacactcacatgcactcacatacatgccacatgcacacaatgcattcactcacatgcacacagacacacgcacacaatgcagccacacgtgcacacagacacatgcgcacacacacacatccacaatgtactctcacactcagacacgcacacatgcactcacacacactgacacaatgcatatcacatacgccacatgcacacaatgcagtcacacacgcatactgacacatgtccacaatgcactctcaccgactcacagacacatgcacagtcacacactgatacacaatgcacactcacatgcactcatacattgacacatgcacacaccactcacactgacacacatccacaatgcagtcgcttacatgcactgacacacacccaatgcacacaaccactcacacacaatgcacactcacatgcacttgcacacacacagacacatgcacacaatgcattcacacgcacacatacactgacgcacacacaacacacttgccccacttagcacagggcccggcacagtgaggagcaggtgacgtttgtctaagtgagactgaggcctaggagtaggcgacctgggcacaggagagctgagcgtccccttgcagggtacagccacgaatcccagcaaaatgcaccttcatccacagtggcctctgcctggaacggttcctccttcccctgcttgcaggcctcagctcggggcctcctctgcccctctccgaggcccccgtgccaacccccaggcatgccccagcccctcctgcctcttccttcctcttcctccatacctggcaagtctatctgcctctttagtgacactctatctcccttccccacccacatgataactccgccagggcagcggtgactcatgggggtctgacacgcaggtgggagtacctggcgatggccaaaggacacatggctgaacagcgcttgggcagcatgaggtccctgaccctgagcacctgtcatttcccaactggcatcctcgctctttcacataaggaaactgaggctccagggacagggagctcacgctaggccaccaggctggtcaccagaagggcccaggacagcagactaccccacccatcccattcctctggagtccctgtcataacggcttcagatggacacggacctatgaccactcccaaggctggcatggagtcactctcctgggatctcccggtgtgggcactggccgagggtggggtgactggggtcctttcccgcgggcgtgctgcccactggagtgtgatgaagcagccctcttcctgtctccaggcggtccagggcctggcagacacactgcctagaccacccctctcctgccccgctgccctggctccccagtgctccctggacgagctccccagggtcagatgcttgaagctgactcaccacagctcagaagctgggcacgcccgagttgccggctcttggggtggcgcctctgagggtgattaagaggctgttcagaaagcctggattggtggtgggcagcaggtccgagctgcggggcgcagtagcctctgcagccccaaaagctctctggagagaagatgtaaaaccctgcctcagaggcttagacacagacgccccggctggaagggcaagacggctggtggactccccactctctctgaccacctgggggctcgcatacaccctcacagccagtgccggggagatgtgcttgtcaccctggggaccaatttctgtgactgagttgtgtctgtgaaccccaggaagggcaggacagggtcctttactctggactctaaactcagggcctactgtggtgcttggcccaaacggcagctccaggaggaatttgcggaagggggtcctctggagacggtgacgccccacctctttgccttctcctcttctgtggattccctgagctgtgcagggaccccagggcgagggcatggcccttggatacaaagaccctgcctgccccacagaggtctgggcccagcagagacaagacttgctccattgcccttctgtggctgtcgggcccatctctgttgagctggtaagggacccactgtccacagttcaagctggacctgctggcaccagagcccccagcaccccccaagcagggcccatggcatgagcccagcagctcagccgagtagtcccagccttcctgcccaggcccaagccccccagccccaactgggtctccttccagagccgaactcgctgccccggagggactgtgaaaccaatggccatattccagctgcgctggtgacacaagaagtcggagtcagtccttctggtctcgagtaatgcgatttgcaagatacacacagcccccgacaagccaagtctgcctggtggatgggttggctggagggggtttcccaggggcctagttagagcctgggggatgaggaggggctggaatcttccgggaggaagtagtggtggctctccctgaaggagagaagcagagaaaaaaaaaatgaccgtggcagagagaatagaaattaggcagggagggaagaaaaaggtgaaaagggagaagattaaaagcatggaaaattctaggggccacagctgatcataaaggcagaagaaaaagggttaaggccggttaggaagctccgagacaggtgctccagagaaggaagccaagagaagagacagacggtgacctgtaatctccttcacggaggtcccagctgctgtcccggtctgggtcggaatccactggcctcccctagtccccactatgccccctgggtcccacaccaccaggagctccggacctccctctggacgcctgcccatgggactgtctgtcctggcccaggtgccacatgggcctagcctgggctgagctgggtgccaggggttgcaagcacctccccagagctggcccaaggccaccactggcctcctcctctccccccccgccctctccccagccttggaacctgatattctgctttaagccacctttgggttgtgtccccaggaccagaggacaggagacagaagggcacgtgggctatcttggcctccacctcctccaaggacggcagccgtttgtgcttcccaagttgtgtggctcagcgtctgccctgcaggtctagcgggcagcagacaccccgctgtgccaggctggagaggagaggcgggaggcacattcattgcatggctgcagcgttctcccctgccctctgctaacctcccagcatgccgaatggccgtcagcttacccccctctgcgagcccaacctgctcctctggcccataccggttggagagccagggggcacactggcacacccatgctgcccaccaagcccaggtcctcaggtgggacaggtcgggatgggcattcttcccatgtccatcccagagcctgggtgcaggtggacccgcttcctagaccctccatgggcaggggtcggggagattttactagtagttcctgggaactggtacatgattcaaaccttagtctgctcagccatcaggatgaggttttgcagcctctttaagggacctgaaaaatcctaccaccctcaatcaagcgcagagttagctgctccccattgcctggaccatccctggccccggccctctccagcccctgagaaacacacatttgtccacgttgggaggagccccagtctctggacagagacggcccccagggaagttggaggtccgaggctgctggctgcgcacagcccacatgccccgccgagtctcaacactgagcaacccgccgatcctccaccgagcagcccccatctgtgtccagggccggagctttctcctcggccatcactgccgggctcctacgggctccttccccgccgccacgtccaccagccatgcttatcctgtgtccagccagccagagctccctgctcagagaaactcactcaccccacggaacaagacaccatgtggaggtttccgagacaggacccttccgcttttctgaacccaaaggaatctcctaaacttcgctgggtgtcagggttcaggggagatcaggctaaagacttgcaggaaaagccaagaaagagcttaagcctcaagaagcctccagataatgcatgttttcttttgcacatggccaagaaaaggggttggaaaaggaccagaacttcctgaatcttcgttgttcaggagaaagcgacatggactcgagccccaattctggaatctggctgcctgggctggaatccaggttctgcttctcagcagcttcccgaggtagtacgtgacctaacctcccagtgcctcggtttctccaactgaaaacatgcatgtccacaccctcagcagattccagaacaaacgtcagctgccaaggaatgaaactggggaagaacccacaaatgtaaccgagctacttcagtaaccaaatgacatcagggtaaagaggtctcacctgtacggatgcgtggctcaaagcaaggaccaagtgccatcctttccccccaatcattcccagggagtgagggcgcaggaccgctgcgtgggttcattcagaataaacatcacccgacctcaactacttgtctggttaaattctccagtgaacaggacaatttttcggatgtggctgcagccagcagaccagacctgggcagcaatggatgctgccgcgggtgcacgagctgctgttcagtgccctcctccctccgctggccagtggtgggatactctctagccacccatgctgacccgcgagccagcgtgtctcagacggggttcctggaatcccaccaagtcaacaggggaagcatcaacagcccagggaacagagactaaacgcaaggtgcaaggggtggtgctacgtctgccacagtaattaatcctgattaaaaatgcctgtgattagcagcctcgctaccttagagggaagagagaatgattattaataagaacagtgcctcctaatgaatctcagaacagaccctagaatccccctgcccctcggcggagcctttgggttccacaaccagagggaacgtgctctgccatcaacaactccaagaagcaattgctgggcaccgtgaagccgctcggaaacgccgcatcctccacggaagcttccggtgcctggtgatgtttacctcagcaagggagactatctgtgatttcaccttgattgagcacacacggagagcaaaagcaacggaattcacgacgcgtcccccaggaagaccctgggtcctctcagggccagtccctctcccccggccagccccctcccctccccttacaatacttgaaggcactcacagccctctcccccggagccatttactggcttgcaataggatggaataagattctcttttataggagactgcagtttaataataaagtaattaccgtgacaaaatcccatttttcgagcttggggttttttcctcctatcctctcaaacttggtccactggatcccaggccagggcctcccagagagtcctgctgatggtctagattttcagatgagctccttcttgccctgaaaggtgaccagtatcagccccaaccctcctcactggccatcatgcaccagcaacaaaagcttcagggttcctaggaggggtcagatgttgggggaccacggcacggggctacccttcagggagctaggccggcgcccaagtggggctcctggaggtgggctgagtgggcaggaaagcttcaaagggcatgaagtgagtgtggcccagggtcacccctcatgagctcttaacaaacaccagagcccaatgcacagctggagttctcctggtgtcagatgatccgaaatcatcccgggatggtcggaactcagaaatatcacctccgctgctgggagaggggctgagaagacagagggaccaacaacaagtgcctctaattaatcacagaactgttgtgtctcaggagggacacaccccatccccagcctacctagggtccaacccaaggcagcaggaaaaggctcatgcttcagtagaacggaattccgctgggtgaggttttagttggtaatttccagtgtgaaagactataggcttagaaagcctgtttaaatgctgcatcttaatgtgcctcaaactacgtctcctgtcttgcttgatttcacgtcttttgctcccgctcttgttatcaaatgtgctgttgagattgaatgtacagcctacatatggtgccaacactcacgcagaggacctgcagcccccacctgggaggctggagcaccacaggctctcatttctagaggcctggccgggtatggccctaggcccctcctcctgtggcctttacctccgggggctgctgcaggctctggctcattccaaaggtggtttgggataagcgggttcccaaactaaatgtcgttatttgtttcttaacggttctggaccgccccagctgtgtgtgctcacctaaaaacatacacccacaaatagccaggaaatggctgcattctagacctttccggagtccaccgagacacatggccaaccaccccagcagaacagccgcgggcgagggaaggaaagtgaatgctcaaagcccggggcaacagcaggctctggctttcccagggacaattcgggatggctatggctccgtggacatctttttgccttcccactgcccctacagaaagctccaaatgccacaagtcagggatgcattcacctagctctggagaaatcggggtgtcttccccgtgggtcatgttggtggactcaccccaactatgagcgctggtctaattctaccgagacagcgccaaatgtgtggctgccatttttcggaggcttgcctctacttcatcttaactcagccctcacattcagccagtgaggactatgtcattcaaggaagacactgaggttcagagtggtgataactaagacaacagaatcaataaaccatggattggtctccagaccaggacccttactctaaatcctacactctatctgcagaaacccagagctacgcttcctgctgcctgggacattcctgccatgcctgggtggctgtacagcagatctgtccccaataacctgacctggccaccccagagattcccaagtcagtcctatgctcatggaaaaccgggaggggctgggaacctgacctcggaggcctatcctgactccctgtgattcagtgtcaactgggaatttagggcaatggccatggcctgggattggatgacttcctgcctgtcagtttgggggctccccagtggctcctgggctgtgtccaggagtccccagatgtcacaggtggtcctgggaagatggcaccaaagatcaagggccctgggctgcaggccactgccggccaccctctgccactgccggccaccctctgccactgctggccaccctctgctcctggaccagcctctgctcctgaccatcacacagttcccctgtccctctgcggctgctacgtttggcagtccctcatgcatgggcccttgtaacgggctgacccaagtgcccaggggctagctgccctgggccagctcggaaggtcccatctttgccttctctgtccattgctccaccttaaaccaccttctatagctccttggagggccaaggggcacaaacgggtaagaacccatcacccaaaggcccagacccctggagtctctcattgtctccaagaaacacacacacacacacacacacacacacacacacacacaaacacacaatcactcttctccatttctcctccaacgtgtgcatggaagcgggggtggggagacatcttcatggagactcttggcctggcctggccaagttccttggggtgggcaccctgtactctctctctctccagtctcgaagcccccaacacggggtgcagaacgcgtcctatgggaacccctctcactgggccctgcaggccccaggatgagcctgaagtgctcacaatcccaccaggctcctccagcagccgcccccacccctgcaggcccaagcagagggtgagggtgggaaccgaaaacaaggcagacgccacagcgccaggaggaagagacaggcccagagatgtgggcagccagggtgggtgaggccagggtattgaagcccgggccaggctggcgccgggaactgcggcccacagaggccgaggggcctgggggagacgagggagtccccctctgtccccagtgcaggcctgggactgcactaattccgcattgggtggcagcgcaggacccccgtcccctcccccaacgccccggccggccggcgggcaggcggctgctgatgctctgtgcgcacctccccacggggcatcctggggatctggtggctcagagtcgccgactttcctgcccccacccaaccccaactcgccagccggagcttcctgcgcagcccccaagattgcaaaagtctggccccagccccctccccggccagagctcctggggcctccctcgccaggcgggtggcccacctcccccgcctccccggaggcccggcgcgcggtctgcgctgcagcagagctcggcgcccccgccgccacctctgcgcgccccccggctttcccgacgctgccagggaggatgccccgctccccgccccgagtccccagcggcccggcgcgaagttccccaaagtgacccgggcgccgagaacccccgccccctcccctcgggcttccccggagactccgcccgccgccccctcccgcgccttcggaaaagttgcgagcgacgccccaaactccggcccccccgcctcgcgccgcgcgcgccctgggcgcccccgcgctcggccgccgcgcaggggcgcagttccccctaccccagccccggcgccatgacgcggggagcgcagcgggggccaccggtggcggcggcggcgcagaggcggccaagtgcggggcgtgggcggcagcgcggggcgcacgtgcgccgggccgggggccggggccgggcggggggccgcttacctgttggaggtagaggaaggcgggcgggcagggcacggagtgcgggagcatgctgccggagttggacagcaggaggcagcccgagttcgccatggagcacagcatggggcggcaggggggcgcccggcggcggctctgcgctcgctgcgtccctcggagtgtgcgcgcgccctgcctcccgggcgccctcccggtctctctcctcctcctcctctgggcctcccctccccctcgtggcgctctttaagagggaggcatcgaaaggagagcggcgcgcctctgcccggtgttccccctgcccgggcggggaggctggagagagcgcgcgcgagaatacggccagagagtctgtgcgcgagagatcgggcgagcgggcgagagcaggagtcagtcactttggagcctccggagccctgtctgcaaagagtggtgcgtgtgcgtgtgtgagtgcgcgcgtgtgcgcgcgtgtgtagcggtgggagggggagtccctggcgtactccaacatcaaacggagccccgcgcggagggaagagaatccggagcgacggcacaacagctgatcccacacttaacccctcgcccgccggcaccggggcagccctccctcgcgccctcccacgctcgggcccctgcgcgcccctcctcccccccgttgccagcacttgctcctggcctggggggtctggaatctccctttgcccccgctccgttctccggccgctgcggagaggaggagccgctccgccggctctgcggccgaccgaccggaaggcgcctcgtcctgtttcgcgttcagagaagcgcctttcctaagggaggccggctcagtggcggggatgtcggtgatgtaatccgagggcatctacgcagaggcttccgcgctggggaaggcttctctggctgcccagggcttggaaatccaaccagagcctccaggagcgtctcctgccctcctgctggcccccagaccccatcatacatcccagcctcctgccacaggcacctggtcttgtggctacttagatgggggtgggggacacgggcaccggccacaatgcatcctcccctccctgtacccagacacactggacttgacgtgtttcgctcccacgggacaggcgtgcataggtccccacctccttgccccattcagcatgtggcagaggtctcggcagtgccccttgttccaccactgtgactgtgcacacacctgcagcttcagcggccacacacacacccactggcctgccccgagtccacactcaccagaggccccgtggatcagtctcagtttaccaggataagccacaggtgagcttggctgcaagagggatgggctgccagtggccactgtcagaggcagagccagtggctcatgcctaacctcacgccttccaggaaaggggcagatcccaggcacccagtacccattctgaacgcacctgtcctaccttagggcacttgtgactcccctcctctcactgcagacagtgagccctgagctggagggaggcaggcctggggccgcctggcagtggggagatggctggcccggcagtcatgtcggaccctcacttgctgtgtgatctcaggaaggtcgattgtccccttggggccttggtttccacatccagcccgagagatgggtcagatgttgtctgagatccctgttgcacccactgcaggacacgtggcctgagggccattgaggaagagggaacaaggaagggagggagagaagggtggcctctccacgcccagtttaggaggctccatttgaacaaggcaggtaggtgcaggcacctgggaccattctctcaggtgccccttgttcatcttcttcgtagaggagctgggatgtggagtccgggagggaggcagacaggggaagagagaaggctcaggggagagacgaggcaggcgagctggccatctagccgtgtggtctgacctgcaatcctgctctgtgttccctctggggtggtgctggcacaggacaaggatagggggctggtctgtctccacagggtcttggctatggacttgatgaggccctccctgctgtcagtaacttggtttcccagcctaggacagtggtgggggtcccagcgcaagggccgggcatgcctgggccaggaagatgaggtgggttgtagcatttgccacctgagcctcgcagaagggctcctcgtgagcgtggtgccctggagtggcccttgctgcctccctcctgagtcaggttgttcttgcttgttccagaagccatccctcttttgtcttctctgggcacctgtccgtcaccactgccctgctgcaccttccctggaggatgctcaggaattcgggacagccacatagcattcagccgaaacccaggctccagatccaccctgcctgtgaatcatttgctcattaatttgccattatgaccattatgaccaagtatctcctgtggaatccaagcctcatcccctccagaaagggatttgggagtgcttcctaagccatgcctgacacagagccactttttgagtcaacgctactgtttttccttattgagaacccactatatgcagacagtgtgctcggtgctggggctgcagaaatcaagttctctgccctggagtgagcacaccgtctagtgggggaaaccaagcttgtaaacgaagactgcagcctaatgtactgagagctttgacagcccaggacagggagagctcagatctggggtgtggccagggaaggtttcctggacccctgagctcagtcattggcccaaagaaagccagggtggtccccactatctgcatctgcatcacttctggcagccctgcatctggtcacctgtgtgcctctctgcccagccacctgccttccagcctcacctccagattgcactgggcccaggagcatgtctggacacctgcctccatcaggcggctcatcacacccagctccagagagagaggactgagaatagcagaatggaatgaaaataatacctccagaaaaaggatctgaacgtgtgtgtttggcttatttcttgggacaggggctgttacgctgtgcttcagcacgagccagttagcgaacagcacgcacctcagtgctccgctgtgatcgtttcagagtgtcgcgcaggcctgactctgcggaccccaccggcaggaaccatgccctcatcacctcctacctccagtacctggcaccagggcggtacgaagcttttcagattctccaggccccatgcagccctcccgagcccctggtgccttgtggactggggtgggtggccctgagcagggggtgggggaagcctgtgctcctggtggctgtgctgcccccgctcctggggcggagggaggctgcgtgctgggaagagctgtcactccagtgctaatattcactacttaaaaaaaagaggcaagaaaaaataccccattcgccctgaatctgagaagggccttgttaggcaggcaggaactgagctgtaattatttctgcgctcctgggcaccactataaatatcaggcaagggaggcacctcagaaggttccgatggttccaaggctttggagatctcctggctccttcctgcccccatcctatgtcaccttccctggcaggggccttggagggtgcaggcactgcctctcctccagttgggcagggcgtgtcttccccagcttccctgagcgtgcctgcctgggaaattctggcccacgtaaccttgccagatgccctgaatctcttcagtgtgtacctctgtgaaatggacacacaggattctccctgggagagcatttgctaaaaggtgtgcaggggaatactagactccaaggtggcctgtgtttttaacaaaaggtgggccaaatgagtcctgtggtcagatgacttgggggagtatttcttttgacccctacccatgtcctttggaaattcccaaggtggcaagtggcaaatcatagtagaaaggaagcaactccacactccctttaggggaggaagggaggtgaattcctcatgctcctgcccctctttccccttccaggcgcccaggccgaccatcctcaggcttcccctgcgccgtgaggacagtgtgcagcttggcagcagcgctcccaggacaaggagtgagctcacagtctctggttgcagctgtgcttggccgcgccaagccgagccttcatcgacaaatacatcgtgctttccgcagagccagaccttcctgccccagccctggggtatttggcctgggcttgggcatgagcactgggggacgaaagaggcagagtggcagaactagatctccacagtggggtggggtgggcatggctcagggatgggaggatgtgtgcgtgcctgtgtgtgtgtgatggggtgtggggagagccaagaagccactctgaccagctggagtcctgtatcaccatggaacactttgcaggggaattaatgtcccaattcagcagccagggcaacagggttggagtcagggagaagcccccactcaggctttcatgggatgcccccagcagacaccacggggcaaggtcaggctggggatgggaaacccagcagacaccatgggggaaggtcaggctgcggatgggaaacccggcagacaccatggggcaaggtcagcttggggatgggaaactcgtcagcctttttttaaaaaaatgtagaaattctcacattcccagaggaggcggcttccttatatcaggagtcgggggctgcttccactttgttctggcctgtttaatctccccagaagggcagaaaagccggcagagggtccctgcaagcaggggtgaagcaagcccagggatgagccgtcggtgcagccctggcaggcgaggcctcgctggaggtggccagcagagggcccactcacaccaccttcaccggctggcctgcgaggaagggctgctggggtgctccccacccccaaccccctctgcctccctctgccaggggtcctcagcagtgcagagggaaagctaagcccagcccagctgccggggccagcactcaccttccggctcagcgggggtcccccacccactggcactgtccccctggccccagcagagactgcagcaaaagtaaaaatcggcgtgcaaaggaagtttatttatctgtttaattaagaggcgtttgccagccacattcgggtccatccgtctcacttacaaccatgtcccagcaaaattaaacataataaatacagggagactgaaagcgaagggcacacttgagatatatgggcagagccaggagttgcacagggttgcagttataagcacatctctctcttgcaagttcctctcccctcgggggcccaggagccggaggaatgcgctcagagaaggggctgtgggtgccgctcactctgctccttccactccgcactgttgccaagctttatttattttaaatgagcccccaggacttctcccttctcctcttctgtggaaggcgagcgagctctacaccgagcaaaaggaacatctgaaagcagccagcactgtgatgttccaccccagggctcggtgggtaagaggccttggaagctgcggccctggaaagctcgttgcaagctcctgctgcatctgggccatgagctcctggcaaggagacagcctaggctgagcagagcctgggagaaacagatctttggtcttcagtgccagctgtggccaagccaccgtttggcaaactgggcccagaatcccacagaagccaaaggaagaggggggcactttgatttctgtctctcatctgaaggctcaagagcctggccatttgcttaaacttcccaggaacagaagcacacaaagggggagaatggcaatttattattactgattgctaactgtaacaataccttgtatctgctcagtgctttcctaaccttttcaaagagccttcatgtatctcacctgatcatcacaagttaggtagggaaggtgtaatgatgcccattcgatatatgatgacccttttaggatcacagaggtggtccaaggtcacacaaccagttagaggcagcgtctgggccagaaggcaagacttggaacttggatttatgggagcccttttcttcccttcgactactgtgctgggctcatgcccttctgtgaacatgctcgtcgttagcccttggctctctctcctaacaggatcaaccccaaaccaaatccgttaatgtaatagtcatttgcaatagcttgggcgtttactaatcacaccaccgctccgtctgtgcagcaattatctcgaatttcctctttctcattaggcaggaggtcgcgaggactcagtgggttgctgagccctgtgatgacgccaaggagaggagctgctgctagaccaaggaagccctccctcagcgttcctagctgatcttccatgcagcgcccaatttcctgggccctcaccccgtgctcagctgacccaccagccccgagccctcctgtcctgcccaagcctgtgcatgtgtgcccttgtgcccagaccatagatggctacagaaaagagagtcctgaatggcttgggaagttgtatatttgcttggagatgatgactccagctcggactgggtatccagtgaagtgcccttggatggttgggcccccactgcagacatgactgatgacagcctttgctcctgccagggcagggatcgcaccagccaaggaaaacccatatcactcgctgctccacgcagcccacccaggaggcatgcaccgctaacatcactcttggtacccccacttgctctccttcagcatcagggtcaactccagcctcctgtttgaggtcacctctttcccccaatcaaataacagagtgaaggccgggtgcagtggctcacgcctgtaatcccagcactttgggaggccaaggcgggtggatcacctgaggccaggagtttgagatcagcctgggcaacatggtgaaaccccatctctactaaaaatacaaaattagccaggcgtggtgacacatgcctttaatcctagctactcgggaggctgaggcaggagaatcacttgaatctgggaggcggaggatgcggtgagccgtgatcgcgccattgcactccagcctgggcaacaagagtaaatctctgtctcaccaaaaaaaaaaaaaaaaacaaaaaaacagagtgaagaagaagaaaggagtcctcagggacaagagtgatggggctggaaggggaagtggcatcacgtcgcccagtccccggccttctagctggcagacaccaaagccttcagagacacgtgctctcttttttttccccttgaagctctccactgggggagaccctgctgtctctccggggagcccagttaggtttttatcaccctgagtgccaagaaactctgcctcgtggtacacaaaccttttccgtcttaattttattcaaagggtgaaggctttgaaagagtgacaagggggagcttagaccagaagctgaagccactgccgctccctgtagctcccaggagggactggggccactgaccaaaacttgtagagcaaagccgtgcataaagggagggggctgagtgagcacagctcttgcataccgatggggaacaggagccctgcactctcagggtgtccaaaagggaagactgtacacacaatgtgggtacaatttgggtagctcccattgctacggccggcatgaatttgcaccatgtttggttagaattgaactgaggaaacagcattcagggttcctgagtagagacccatgggaagaggtcaaggtttgttcttccatcaacagcgggtgggtctgagctgacccctgggtagaggcagcaagggtccacctccagcagtgaagtggctgggtgctcccatttgccatcaatttttagaaaatcttacttaacagagaaaccaatatcccttcctccagcactgggcaaggagaggccacatggagagcacgtgcagcactgtagagagggaatggtggcccgggggtaccccgcaccccaggactgggaagttaggaccttcaaactctgaccaaacctgaaagactctggaaaaagcagctgcctgtagccccagccccagcactcagtgagttaaaaagcaaccgcaaggcctcgggaaacagaatgtgaggggcgggcactctgttcgtcccctgcccctgcatgccccctaaagccaaagcgtcagctcattaaaagctcattaggagcccaaggcacacaaaggcccggagaggcattactgtcctggcagagtgcgtggccctggggaggccgatgcactgctaggcagccagtgccaagctgcagacaggggccgggccatggagtgacgaggcggccggcggcgggaggtaggggtgcaaggtccttctaacgaagcctcatgggagctgagcttgtcccaggactcaagggagtggggacgagcatatctgccaggaagcaaaggaacagatgcagacggtaacctacagactcacctccccacacctccacaatgacagaggccagataagagttcctttctcaggctttgagagcaaggagaaggcagggttaggcaggaccctgggcagcctcttccctcccggcagcctaagatacaccagggaagttgtgtgaattgctgcccggtgagcagagatggggcagtggatgctgatgtgttttagtccctaaaagttgcccaagagcaggggaagtgcctatctggtgggggtgtggaagcttgtcttgagttaggtgtgaagctattctgaggctgccacccctgccaaccccctaccgtctcctccctcttgatcctgggaggaaaatccctcccctttcctgatccactctagcattggggtccagcgatgttttggccccaacacaactctccagttccaaggcatgaggtttctgagaattcactggcaaggaggtgtgggaagttggcagccagctgagggccctatgctgctcttagccgctcccggcctttcctcccactgagagttgctgcatcaggatgggggggagccgtctgttcctgctcttacttccctaggatgctgtgacttttgattcctgcttgattaatatacagccaacagagactgtatttaaggcagctttaattctctcaggtcaccaaactcgggagcagcaaagctgcaaggagccagccccgcaatagatcaaacaccaggaccttcaaatcgctctgtggcccaatttcttattgctgctgctgcctgataaccctcccagcttggaggcaatagctcctttttctaggggtggacacgggggctggatgtggatgtccatggctgaaaccctcctggcagcacggaacgagagctggaaggaccgggcacgagagtgagaccgtcagcaccagggacagctccagccagaccctggagccgccgtggctgcctacacctctgtctccctgggcccaaacaagcacgggtgtcagtgaactctctgttttgcaggggtggccagcggctagccctgctgatggccaccttttaccaaaacatcctcgcctgttgagttagcctgctgctccctttggggccctgcacactctcactggctctgtctccctttaggagatccagcttttgccatccctgacccccagagggaagcaggctgctgtgaggactatctgtctggcctctgtgccagcccctggtgcccagggcttctgtggggccaacagtttccttcctggctgaacctcatccgcttccaacttgcctcattagcatctcctgaaaggcaggctaattcctctgctgagcacctgggtgttcacttgctcggtgggggcaggggcaggcatgccggcatggctgccgtttcctccaaagcaccttttatagacctggtccgtgttgcaatttgggaggcaccggggagcagcacaatgtggggagattacgctcggaagccgggcttgtaaattacctcccagtgggggcagggaatgtgcctattaacagagaacctggtgcacacagccattctcatttaagagcaggatcttcccggatcagactctgatcaatccttgctgccaccaacacaccatatattaggaagaaatgtttgcattgaagttggaggaagccccatactcacctccccccgccaaccccctactgctgttttattaggattttctctaaacccagccccattggatttattccccctgctctgcctctatccacttaaaaatattgtctatggattttcaaattattgctacactttctaagagaaggatgcagtggttaaaaattaacagcaaatttatgggaattctatatggcaattacagaattataatgaagtggctgccacttggctgagtgtgggtaattggaaatccacactgggaagactagaatctttactgtattggaattgtgtttttgagagtaaatgctgtggagagggtcaatggagccttgagtaggccaagttcttctctacaggaaaaagtggtctgctcactgcctattgggaggcaatttagaaggagaatcacttatgctggcccacaggaaggtggctggaaaccactgggggaggtaggtgttccgggctaggggagcaggcctgatggtggaggaggtgggagtgggagagcatgaagggaggaaggccagggcatcaccagcagagggaaggcccactgtggtgcagctcgagcctgacagaaggcagcaccgaaaccctgatgttctccctgccctgtgggttcattttccttggaaaaaaattttggtaaaaaaacagagatgattttatcatgaagacaccaatgttgctctcctttcacatggcgctgtcctcgctcccacagctgctgtggtagaaatggactttgcctctgatctcctctgcagctctttagggccttagtggctgagaggtggagcaggagtctgtgataagggagcccagattccgagcaagggggttctgccaggaatctaggtacaaactgcctcctggaagccaggtgcggtggctcacacctgtaatcccagcactttgggaggctgaggcgggtggatcacttgaggtcaggagttcaagaccagcctggccaacatggtgaaaccctgtctctactaaaaatacaaaaattagccaggcatggtgggcatgcctgtagtcccagctaccggggaggctgaggcaggagaattgcttgaacctgggaggcggaggttgcagtgagctgagattgcaccagccactgtactctagcctgggtgacaaagtgagagtctgtctcaaaagaaaaaaaaaaactgcttcctggttcttcaagagttttgtgtagacctggtgctgttgagtgcaggggccacgggccacatgtgggcattcagagctaaaacacggccggttctaattgagacactccctgtgtgtgtgggtgtgtgtgtgtgtgtgtgtgtgtgtgaaatgcacatgggattttgatgacttgggaccataaaaagagtgaaaaaatagtttgtatctagattacatgtcaaaatgatcatattcaggtatattgggttacataaagcgtataattgagtgcccccagttttgtttgttttactttctcaatgtgggtgctgaagaattaagcatttccatgtgtggcctgcattatgcttctattgggcagctctggtctagaacatgggcagatgtctttccgctcagccccaccgacatcagctcactatcatccccattgcctgcgcggtgcctggccacgggtagcctctcaagaagaagtgcaggccgggtgccgtggctgatgcctgtaatcccggcactttgggaggctgaggcaggtggatcacctgaggtcaggagttcgagaccagcctggtcaacatggtgaaaccctgtttctactaaaaatacaaaaaataagccggacatggtggtggctctcgtgcgtacagtcccagctactcaggaggctgagacacgacaatcacttgaacccaggaggcagaggttgcagtgagttgacattgcaccactgcactccagcttgggtgacagagtgagactccatcttgaaaaaaaaaaagaagaagaagaaatgcaaaatgcaaagccaactgggtctcttcttagagtaaggccgcacgcaagtctgtgtgggcaggaagcctgccctgatctccccatcccaaaacacagacacccagcaaaagggtctgctccatttcagtctacgtttcttggtttctgtctgctctatcctgatatctgagactggggcctccttattttgtcctaccattgcagctgtgcaggcacacagtgtctgctgaggccagtggtggggtggcgggggtggctttccttctgtgctccctcccctacgaccggacagcaccaggaaaccagcactctgttttggggtttggggatgagctcacaggcaaatacttctgcttcctaacctgtgacctgtgctaggagaaagtgtcctagtggccagctcccgtgcggctgcactcgcttgcatttggctgctgggtgagcttattgatttttctctccgaggtagaaggagaggcctcggaaatgccattccagtgaaactgggcatggcgataattatcatcatcagaacaccctggacaaattggatctcaggcacccagagcaccctcagcctcatgctccaccccagcctcctctgaaggcagagggaaggaagtgggagggtgaatattattcttcccatctcgttggatggagaagctgaaacccagggtagaggagtgtcccaagatgggaagtggaggccgggatgcggggtcggagtcactgcccccttctactggagaaacagcagcagagtggagcttggatcatcttgagctcctaagaagactgtagtcccgcatctcctaccttctaccacacacccagccacagctgtttctcacaccctcctccagcagaaagtggggcccgctccagcctgggagtcacagacccggagtccagcccatctctgccccgaccacccgtgggactctgagcgagcaactaaacatctccagtgttggtgtctgcgtctatcagaatgggacggcagtacctctctcagtatcgcattcccacaataccttgtgaggattcaaaaacatgtcatatacaaaccagctggcacatagtagatgttcaataaatcatggtaattaattcaacaaatacttattgagtttccccaagtgcctggttttgttctaggtcccttctctctgcagtgcccagatgagactgctgatgaaatttcctctcttcacccggatggactgcacttgccctgctcatctcctaggccttggtacagaaagtacagttaactctcaattatctatgccaatggagtggaacgttccactgataattcagaaagagcagagagtctacagataattcttatttgaattaggaatgcattatgcttattttcacatcgggtttaccttcctaattactgtttgttctggattatgctcaaactggtttgcattctcagaactcacatcggtgtggtgaggggtgtgccgtggaagtgtactggggcccaccaagtggaaaccagccacagaccacctctctgcactgccctccagcaccccgggtggactgacgcctgctaacagggaagtagtaggcactggggctgcttggtatctgcccgggaggaatggtggcagctccttgcgtgttgttttaaggctgtgcccatgtgggtggctgggcacgcgtgggtaaaatggaaggaggtgcaccagttcctgtgagctgtgattctccccagaaagccaggtgcagacataagaggcatcctcacatgcagccctccgtcggggctgtccacatgctgttttctgtctgtctcttctctgtgtctcccgctacatctttctttgtgtgtgcatctctctgtcactctctgcctcccctccacactgccattcactgcactcttttctctgggacaaaccaggaaacagatatttcttttctttctttctttcttttttttttttttttttgagacagagtctcactctgtcgcccaggctggagtgcagtggcatgatctcggctcaccgcaacctctgcctcccaggttcgagcgattctcctgcctcagcctcccgagtagctgggattacaggcatgtgccacaacatcctgccaatttttttttttgtatttttagtagagacggggcctcaccatgttggccaggctggtctcaaactcctgacctcaagtgatccgcccacctcggcctcccaaagtgctgggattacaggcatgagccacctcccaagcccagaaaacagatatttctttctacagacacatcgtccacgcagccagggctgcagatggtcggggcttgtgtctagctgggcagttcctcctaatgccactccattcccctttgtacagcagagagggacggagaaaacaccaatctaacctcccaaaccacgggcaagcagggagccggaaacccaaagaaaagcctgagtctctgtgcccttcctcacctcccccgactccgggcatggaagggggtctgccctgcaccaggcaaccaagacaacatctatctgtgactgcggcgcgtgcttctgatttcctaagcatgccgagtgaatccatcccgagtgcctctgtctgcgtcaggagagtcgtgtggggtgggcttgtcatcccggaagtgctacggttgcatcgtgtggggtgggctgtcatcccggaagtgctacggttgcatcgtgtggggtgggctgtcatcccggaagtgctacggttgcatcgctggaccatcctcaacactggaccagaccagaaggggaaatcatgggtgacaaccgcctctggccagccctctgccctcgcccctgccctgcacctctccatcccacatgaggcgaccttgcaggcacaggtgcggacaggaaggagagcctgcacctggcgatggtgactcaggggatgtctttccagctctcacgggactcagtgctaaggtgacagtggaacgctggcatctgtgtcccgcctgccagctcatggagaaagttcacaaatgtcacctcagtatgcctcactcaagcctgtgggacagatgggtacagctggagactgaggcttggagaagttcacagactttccaggatgtattgcccatgccactcgtcactctgataggacttttagagatgtgagaagcctccctgcttttgaactttctctctctctttttttttttttaagatggagtcttgctctgtcactcaagctggagtgcagtggcatgatctaggctcgttgcaacctccaccttccgggttcaagcgattctcctgcctcagcctcccaagtagctgggattataggcatgtgccaccacacccagctaattttttttgtacttttggtagagatggcgtttcatcatgttggccaggctaatctcgaactcctgacctcaggtgatccactcgcctcggcctcccaaagtgctgggattacaggtgtgagccactgcacctggccgagctttttgatgcctaatattctactgcttcccactggttaaaatacaaattgtctcctgcaaagatgctgagtttgtgaggctgaacattgcctgtaactcagttgtgaggctgttgactgagaactggtttttagggagagagggaggagacccagaaaacagtgggaagcaagtgggggctgtctccatggagtgaaagctgcccagcaaagggtgcagctgtggtcatagggtggggatgggaaggcagactctggctggctcactctgccttctgagaatgtaaagggcctttcgaaaagacctccctagccccccaccctcggcagcaccacccaccagccccttccggtggacttcacacctgcacggcacctcctggctctcattcatcctgcccttcttcttccagcaggtgggagggtcagactcagaggagggagcattcccaggagcctccaaccctctgcccaccgccctactgcaggagttgcagatcttgggggtctctcagtgggggaaatcagcccaggtgggacttgaggaagaggagaaggccagccatctggatggcctgaacccagtcactgacttagggctgccagtgacctctgtggtgggaacaggtgacctagaacacactggtttggtcccagttcaagaagtaattagatatgctctcaaagaagtccccaaagctttaattaaactccaataaaagtgaggctcagtccctttgttgcatgagcttcatttccaagagtcacacatggctcctggtgaccatattgacacagatatgacattgctgctgctgtaggatttctgaagcacgctgaacaaacccaccctgatgctccagtctgtcaggagagtgtctattctacagtaccgctctaaagcttcccacatctcagtttccttatctataaaatggggagaaaagggccggacgtggtggctcacgcctgtaatcccagcactttgggaggccgaggtgggtggatcacctgaagtcaggagttcaagaccagcctggccaacatggtgaaactccgtctctaccaaaagtacaaaaaaattagctaggtgtggtggcacatgcctgtaatcccagctacttgggaggctgaggcaggagaatcacttgaacccggaaggcagaggttgcagtgagccgatattgcgtcactgtacttcagcctgggtgacagagcgagactccgtctcaaaaaaaaaaaaaaaaaaaaattgggagaaaagtaccctccttaagtacttcccaaggcccagtgagatgacagatggccaaagccgagtgtacagatcatcagcaaggtggcctgtgcccaagctgctggacaaaccctcttcaccacagccactcccagggagtcagaaggtggggctccagggaaagccaaagcctcttgatcaggcagcaggcaggggggccaccagctgtcactcaggtgtcccacctagtctaagagcaaatacaagaaaaagaagaaaccagccccacagacagagtcacaagacaggagtggcctcagcacagagccaagaggggcagaggtgccgccggagggacagcggtggccgagcagaagccagggaccccacaccacctggctccttgcagcgccagaggagagctgttcagggagggccttggtgggttgggacatgaggtgtctcaggtcacgtctctggggagttgagacgccaggagagctctgctgggctgccaggaaccctgacgtgaactcaataataaaagcaaacgagaactttgcatggagggtacagctttgctggggaggggaaaaatccacaaaactgatgggggatgcacctggacccctggtcccccctacctgatgtagtgacaagtcccctccttaggccatatctgggaagccaagacagaagaaatccacccagcctttcaccccctcctgcgtcctcgtctctgtgtgcggcgggcagctgggcctggccagtcccaattccctcaatatgagcctgtccctcccagcccttcactgccctcagctccttcctcagccattcccacacgtctgtgttctccccacgactccttctctcctctcttcccaccctctccttgtgtgtccttttagccatcacttcttaacaacaacaacgacaacaacaacaacaagaggtgcatcagatcatccggatccgatggagctgtaaccagatccacaccagaggcctcagcattgccctgacacacagagtccgtccgcccactgggctgctctctcctggtctccaggttggaatagatctactcttattggctcagaaagtaatgggctgagagagggaattctgaatactttaaaaagggaatgtgggggatgacctgggtgggagaggggagggagggaaaccagaggatgttttgctcccagaaccccggcagtggcagactgtctgccagaataccgagaagcaggtggcctgctgtgagctcagggagggctttccagggctagggagccctcctgggcttctcaagtctgcctgggctgcagttcctggtcctgaaccttcctttcttccagcattttcctcctaaccctggggcattcatgatttctgtccatcctctcaggaggggactgttcacgatctctcttctctctctttgtattttctggaacacggaaagtgcttctgacaggtgtatcacatcttctgcaatcataacactcttgcccctcggaggtggcggaggtggcccatggcccccatgcccgcccagtgccaagctcacacacagcaccccctgccttctctgtcttcaccccttcccacgtgctttctctcctccacacttccctgactccgctggaggctgggggagattgacgaagagcctggggcagacttgggcaaacttcttgaaaagttgccttctactttcaggcctcctctctctgcgtctccgcccctgcaggagaacccaaatgctcagcttcatgctgacaccaccttctctctacagttactgtctcatcctcctcctcctgccggcttcactcacagctgtcacagtcctggggtgctgacacatatctctggaatctcagcagtcattaccaggagaatgacctcggtcccctgggtgcactgacaggcttccccggcatggggggtagagtagggagggcccaggaaaggagggctctggaggaagacaccccggggtgtggtgtgatccctgcatctgagctggactgtgctctgtcccgctgtatcatctacaggggcctcttatccacagcaaaacgggaggagcctggaaacagagtgggattggcaggagaggcagccctgggtaactctggggctgtgtcgggtaccacgctcacgtataataacagatgactctgtttccccagcccctgaaagccccctctgtgctcacggcagaccactcactcctctgtatcctggtagagtctgccactgctaggggtgctgggagcaatcccttatataagcgcagagccatacagcttacgaaaatttcaccaacaccatctcacgaattcttacaacaaccccatgggacggttatgactatgtcagtgttacatccgggaagagcgaggcccaggccaggggcttgccccagatcgcctggcttgagcccacacagcagacaccaccccagtcccacctccctcctgctcttttattccagccttggctgtgcgtgtcagagcgcacagctgtgatccaacagcccctcgccctaacacgctgcacagcactgcccgccctggggctcttctgttactgccacgtgggactcctgcagagcacactcagccatgcagatgcactatcatgcctggtggtgaaaaggccttaataccactgtgtggggcagtccttggctggacggggagaggacctggtgaataagccatacatggagccccgaggggctaagcccccagcgcccacagtggtctcagctcagtaacgcacccttggattccttctcctttccctattttactctccccagtgcccctccctcctgtgcacttcccaaaatatgctacctgcatgcgagcacttctctcggggcctggattttgggggctcccaagctaaggcagtttgttcctaagatgcctagaaagtggcccctcgggataggattctggagtggggccagacattgctaaggaccacgctgctggtgacagatggggctgtgacaacccctggcctgtgggggcactgtgattacatagaccctcactggcagaggatggggaagaggggcaggtggaggtgaagcatctggctatgctgttcctgtggcagtggtttgagggtgaaggggcgtgtaaggactgtgggggtgggtggagggcgaaggggcgtgtaaggactgtgggggtgggtggagggcgaaggggcgtgtaaggactgtgggggtgggtggagggcgaaggggcgtgtaaggactgtgggggtgggtggagggcgaaggggcgtgtaaggactgtgggggtggttggagggtgaaggggcgtgtaaggactgtgggggtgggtggagggtgaaggggcgtgtaaggactgtgggggtgggtggagggtgaaggggtgtgtaaggactgtgggggtgggtggagggtgaaggggcgtgtaaggactgtgggggtggttggatttattaatggacttagaagctttgaaaaaggaaaacaactgtctcaagctagctgactgtcaacacagggcccctggccttcatggaaatatgtaactagacctttgtctcctaaagcccaggaagtaattgtcaccaattagtttttggtgtaccaattgtataccaattgtaccaattacaattgacaccaatcagagtcaccaaggagcctgaacccacggacatggcacttctcccctgacgaagtccaagcaccgtaggaaagagtgagaccctgggatgagaacgtttgtgtggatgagcctgagaactttgcacccctaaattccctgaacgctctgggctggtggaagtggccccttccatctttgctaagagaaagcagacttttctcacctggagaaccagcaaagacctcaactgagaaattttctcatgagataacacttgtcccccactgagagctgcccctacttcccctactgccatgacagcaatagctagagttggggttcagcacaggccaagggggcaacagccccagctcaggaagaaaacagccacacacccaaaaagctccaagacccagtggatacacaccagtggacgccggggagcggacacacaccagcgggcgccggggagcgggtacacaccagcgggtgccggggagcagggggcgtaggtggggttggggcagaatgtaagtctgaacagaggagagattactgacgtgaaagtaacttctcatgactcagggcttaatatcctggaaaggacacgcgtaccagtccagtgaacagctccttgaagcgcacacataccgacagcattcagtcaacgaggtcgacgcgctggaactactttggtggagtattaaagaaggggtccgaaggccccagatgctgtgaacagagaacccactagatgactctgtgtcccagaagggtatgggggacattccctccactaaggcaataaaaaatgcaattctggggtgggggaccgctgaggcatttggaaagcttcgtggtgagtgccttcacttagggttgccattaggagatgctgccactaactgggctccttagtatcagtgaggatgagaagattctagaatagcaggggccagatagttgcatttaaccatcagaggcaagttggaattaaataccaccgtggtcagccaggctttggagatgaccagggtgctttgaactacagaagtctgcagctaataagccatggtgttcctggggatgaaatggatgggtggccaagtagggtattgcttggcttatatagccaggaaaaaatcaagagctagagagcagagaactcctcagtcatcacaacgggaaactgcagtaccatatccagttccaggtctaaggcagttctccagtcagagcccactggtggaaggaagaccaggtagggcttaggaatgcactgcaatatttataatgatagcatccccatccttccccagatggacctgtggatacttgccagagaacctgtgtcctggggaaggggactagcagaagttttgcaggcaggaggatacatggttagagcagacactgatacctgtgaaatgaaaacaccatcatttctgccagttagagtgggggtccacagaaacccagggatatatgacatcctgaaccacatccatcttacagcaggtctgtcaggctcatggacccatcctgtggtttgttctctggtctctgagtctgcatttggatggctacacttagcatctagcataacctgaatatgagttccctgacgtaggagtgccaaatgggagcctataaaacctccctaacccccagctaagacaggaaatcagaaaaaacagtacaccccagggaacttgcaaaaattatatccactatcaaatacttaaaggaagcaaggatgaggtccccatcctatccttgttcaattcacctacaaaacagaaccctacaaaaaccagatgaatcagagtgggtgatggtggattactggaaacttcaccaagcagcagcctccaattattcacagcagtgttgtatttactggaatagctcgacagagcctctattacttggtatatggtgattgatatggaaaatgtattttccagtccatgtccataaagagtcaaaagcagttggctttttttttttttttccttaaagtagtttgcttttacataggaaggacagcaatacacatttcctatcttgctgcaaggctgcaatcattctcttgctcttttccacaatatagtctgcagggaccttggccgttgtgacattccagagaatatgctcatccgatacactgaggaaatcaggctcattgagctagacgggcaggaaggagcaagtccagctaatgcctgaggaagacctgtgtgtcagagggtgcgaggtaaagcctagcaagaaggtctacagcttgccacgtcaatgaaatatttagagtctggggctttctggaacatccccttgaagatcatgtaaaagcaaatcattgcactccttccaccaagagaggggcacagaacttggtggcctctttggatgctggaggcagcaaatattccccttgggaatacagctctagcctaacacttccaaaggctatccgttttgagtaggtcccagagcaaacgagggctctatagcaggtccaagatgcagtgacatcatcccagtggtgcccgacgtacactgtggcggataaggctgtgtgaggagtctccggcaagtctcattgagagacacagcactgactcctcaagatggttgaggctggccgtcatcttgaagactctgtgatgagctggacatagtacaggggtgcaagaagtgggcgggagcggatgcctcctgtgtccaccttgtctcctctaagccctgcttttcactccagactttgctgcagccatcagctgtccacagatgtagcctgaagacaacttgacttagtgagtctctccaggccaccactgctcagctgtcccctggcaggaacaaacctgaatgtgccggccagttaacaccccatggtgcaccctgcgctgtgggctatggcagctggtggatgcaaccttccctcttctatccctcaggtgggcagctcagaaagtgccttctacaccactcctcagagaagtcctaactggattgagtcttggaaccactccccatctcattgactcaatagtacacctggaatggctttcttcctccccatttcacttttcccagccccctttcctttggctcatttcccaaaataaacctcctgcatgcaagcccttgtctcaaactctgctttggggagaaaactctagactaagacagacaagatttgaaatctgaagtttcccatgcaaagaaaaaagccatgcaagttttctctgtttgcctgtctccccagtagaagagtttccaaatgcttactgggttaaaagtgcctctgcctaatattataattagtagggttgttttacgattcagaaaacagaggaaagtatgaagaagattatcacccatggtctaatgagcttattgggcttaatggttcatatttaacaggaatgaaacgctcctttcccatgtcaccaggacaggtacagagttgaaacttcctctccatgtgcccaaactcactgctggacctgagtgaggcccccagtgtccctcgattagccacctgctcagtggcctgaggccagagtcagggagctacggtcagaggtgcctggatgctgctccacccctagcgaggcctgcactgttcccagcgtggcaccagggccccttgcaagctttaccaagaagcctctcgggttattccctgtggccaggctcgggctgggtccctgggcctatgggctgtggggtcagcccactgggcaaagggatctgggatttcttgggacaagctccaggaacaggaaactttggaacacgccctcctctcgcgggcctaagctcccttcccttttctaggggggtgtctgcaagtctctgtgctgccctctggggaggactggccttcaggaactttcccgtcggccacttggagactggggtgcacaccagggcacctccaggcagcgcctcctgcacgctcacacctcctttccctccccttctctcttcttgctcatcctcagctcttttgcggccagccagtcttgcccccaaaaggaggaatggttatttctttagctatacaattaatcaatgttttggccctttcttttaaaacagtatgggccacaagtccgggaccgcgggagcctcggcaagcctcggctgggctgggtgaaaggtggcccttctctggccagctcttggtgtctccctccctttgttctcccctcacgcccttcttcctgcgtctggagggaaaggcttatttacagtcactgcagaaacactccctctcccctctgttggtagaaccacaaccaagcggatacagcagagctgagatgctgctggcagtgcgggtctccagctgtcagccccgagctgtggctctcaagacaggattcaggcacagaaccaagactcttggtccttcctgcccagccaggctgtctctgtcacacacacacccggccaggccatcccagccaatagccaaaggcctcgaccgcctggaaaccaaaggggctcccctcggccctccaagcagtccggggaaggggtggggctgggagtcagtcgggaaggttgggtcaaggaagagaaaagaggcacttgccttctgctggggtctccaacccctggctgacttctctcttgggatgacttccagcttctggctgtttccccaggtggtatctttgaaaacacggtcagctgttcatcttctcatggaagtgtgggtgccaggcaagtggcattgagcaaccttgagtgaaagatgcccacctggctggtggaggcccttcccgggcagaggcagaggcagaggcagaggcagaggggaggctcttggtggagagatgttgtctgaagccagaattattctgaccgtgtccccacgcttgctcctagggccctgctcctgccttaaggggccccacaggacctcactcccatctccaccctggctgctctttctctctttctttttttttttgtttgagacggagtctcgctccgtcgcccaggctggagtgcagtgatgtgatctcggctcactgcaagctctgcctcccgggttcacgccgttctcctgcctcagcctcccaagtagctgggactacaggcacccgccaccacgcccggctaattttttgtacttttttttagtagagacagggtttcaccgtgttagccaggatggtctcgatctcctgaccttgtgatccgcctgcctcggcctcccaaagtgctgggattacaggcgtgagccaccacgcccggcccctggctgctctttctgtacgtgcccattcctcccctctcccaccaggccacccatgtgagttgtggttggtgatgtggctgggccagccctcctgcacaaggccttctgtgatgtgcccccatcccaggagcaggccagtgcctccttctgggtgcccacattgtttgaaccccatcaccatgtttgcacctgctctgtaactattaatgcacagctccgggacctcccagggggcagggacaaggcttcatccctgttgtgtctccagggctgagtgtggcaggcaggacagaggcactcgggacacacccattgaaccaaacggaactcccacttccaaagcaccatggaacaaaatgtggccggcaccgcaggtgtggcctctcattccccatactggggacttgactttctcctcctctaggcagtgagcacctctgcagagagatgaaccacctcggtaccccagtgtccagcataggtgtctgcacatagtacctgtcccataaaaataagcaggacgaggttgcctgcagagacacagcaagaggtggggtgcatggctcacatgtgctatgaaaggacggcgctggccgggcgtggtggctcatgtctgtaatcccagcactttgggaggcggaggcgggtggatcacgaggtcaggggatcgagaccatcctggctaacatggtgaaaccccgtctctactaaacaaaaacacaaaaaattagccgggcgtggtggtggccgcctgtagtcccagctacttgggaggctgaggcaggagaatggcgtgaacctgggaggcggagcttgcagtgagccgagatcacgccactgcactctagcctgggcgacagagcaagactccatctcaaaaaaaaaaaaaaaagaaagaaaagaaaggacagcgtttctgtgtgcgcacagaggcgccttagcaaatcctgcaaaaacaacagacacacaggctcagcttctgccctggctagataacctctggagcccgagggaagagtgtacctgcctggggggagggatatggagtggggagtgcagggggccacccggttagggcaatgggcaggtgcctggtcaaggagggaggctattcttttgtgaactttttttatttcttcagtgttttttcagagttggacccccggcgtcttcacgctaatgccaccgtcttcatttctctctggctgcatctgctcttcatctccatgcggttatagttttcacctcgctgtaatcaggggtcctgctttttcacttgatgatatacagagacggcttcccttgtacggggacttcctacccatcaggtctcacggccgcacaatatcccatcgagtgcccgccgcatacttcacgtaactatccctttacggcggacaggtaagatgatgccagaggggtttcttctgctgctataaatatcttggcacgtccagcttttttcatcttttgaattatttctcagggatatggtcccggggcgggattatggaattgaagggtcgggtggctcttgtcctgttctgccagttgcccttcaagagatggggctggggtaggtgatgtggaggagtgccctaccaccctccatctgcacgtctggtgcctggtggggatgtgcagcatgggcagagggtgcagcccgcagcaggagctcccaaacacaatgagggtgccgagttttggagtttccaacaccttctccagcgtccggtgatctcagtcctggtctcctctaggcagcgagcagtgagcacctctgcagagggatgggccacctcggtatccccagtgtcctgcacaggtgtccgcatatagttcttgtcccatacaaataaacaggaggaggttgcctgcagagacacagcaagaggtggggtgcgtgactcacatgtgctatggtgtgcggcttgggcagagggtgcaacccacagcaggagctccaaaacaccatgagggtgccgagttttggaggttccaacaccttctccagcgtccggcggtctcagtcctgggccacggagcagacggtgggaacacaggcttcctggcaggcagcacggcccgatgcgggctggtctggtgggtggctgtggcttccgtcgtggggaggcacaagccctgaatcaggatgctcattttggcacacggcagcctgtgcctctgaccctgccaacgccagcctccgccacctcctgcccgctcagcctccggaaccatgagcaggacgttccagatccgagctgctgacaagccacagcaggcaggaagataaatggaagggtccttaatcccaacttctttccataattaagttttgagatcatcgtatgctgaacccaggtttcagcagagctgctgggactggctccaggtggacgctggcgtgcagttaacagggataggggccgtgtcgctgctgccagcagcctgggagagccctgctactcatcccctgcggatgcctccttcccacgctcagactccggggggctggacagacagggaggcagctgcagataccccaaggtcagagtcccaggctccggcagggctgtaccccggtccatctccagccctgactcctccaatcctaatatgacttctcactgctggttggggcatttctagatccctttaccagaaccactggtaactctcctcaaagcaaccacaacgctttgccctggtcctcccttaagccctggactttcggttaggccctctcttagcacctctcctggtcacctgggttgtgccaggctgactgctgggcacggggatacgtgggggggaacaagacagatgagacccctgcccacaaggaactcccccagcgggcccaggaggttgtggccaggccaagctcccgaaagctctggtctcctggggtcttggaagacaaccagccagcaccctccctcctggagtcccgctgcattggggaaattgaccagcgcccaaagacgggcccacctgggcatcttcgaccatgccagggacaagacagcagaaaaatggccccagggagaagggctggggtctctggactcttctccaggaaaaccttcaaactctagacacccttggccacccgctgccctgggttcttccaggctggggctggggctggggcagggctgctccgcctgggctcctacgtgactcctttctcctcctcccctccccatttgcctgggaggaaggaaggggccgcacttgctccagcctctctggctgctccttccttccctcctgcagccgggctcctggcgctgcccgttcccaatttctccttcctgtaggactgctgcaggggccaccctgtttttagggggtcgggtctcaccctgggccccccagtccgcaactcctgactccttattctgcacttccttccttgttcttcataaagagtagatttcagagcaacttaacttctttcacaagcaaattcccagagcctggttcttccccagccctggagggcctccccgtaattgcaggccttactctctctgctccttttcaatcacaaatgtcgctgacagtccccacactaccacttgtttccccttttgtcctagaatgagaaaagcaggctgtggggaggggcggggaatgggagaaagtgcctggctctaaacagaagccaggcccattctctcccttaggggacccagacaacttcctggggcctggaaacagatgtcacctcagctacagtgtttgagttggagtctggctctgttgcccaggctggagtgcagtggcgcaatctcagatcactgcaacctccgtctcccaggttcaagagattctcctgcctcagcctcctgagtagctgggattacaggcatgcgcctgtaatgcccagctaattttttgtatttttagtggagacagggtttcactatgttggccaggctggtcatgaactcctgacctcaagtgatctgcccgccttggcctctcaaagtgctgggattacaggtgtgagctaccacgcccagcctggacatgaatattttaatgacaatgaaaaagaggataaagttcccctgtttctcttgtgagcagatgagggttgagggtcaagggtttagggtggtggtgttggagcaggtggctccctcgcctccctgccctgcactcacccaggaaggggaaggacgcggcgggggggcacctggatccacagccctgcagattccacaagggaagctgtgtcttcaccagcagtccaggcctcgcgtcaagtccccaaaatatgcacccgcaactgctaccaggacctaaatccagcaacagccagacgggggagggtgagatgagggccaaagtcaagggctggccctccccttcttggcctcccaccccgccaaccagtggggcccatccagaggctcctcccccagggtcagccccactctcctgtcactccccctttatccacatgcttgtttggtgagatttcctaagtccttccatcttggatgtcctgagccttccccggggactgcgaccattaggggcactttgcacctaacagggtgtatccactcggcaccgccaacaaatgttgaccagctgatagctaaaatctctcctcctctcttggactcccaccagatataactttgggaacatttgtaccccaaggacaaagggctgcgaacgtcacaggaaacctgactttccagccggccacactccatgcacaagcccagagggtctcctcagccattctgtactgggcattgctgggttttgggaattgaggatgtgaaggaagccaagacatcgcgtgctgcctgtgacctgtgggccacagcccctaaacactcagcggatcagacttggttccgtttccgaaggtggtgccagcggatgttgggaggcccggtgaactacagccaaccctcgcatggcgccgcccagctctggtaggagggactgaaataaatggagtcaagtgaacttctttggtaaaccatgatggatctctctttaggaactgcccctcaccagagctttgccacccgtgggtattaggaccctgataaagtcggcctctccagcaacgcacggagctatctcacttacaacgtgaaagtggctgtgtgttggttgccggcatgaaaaaacactttgcttaatgatttttaataaaaatcagacatggtcatggaggtgcctcatggaggaaagccctgtctcctcattaattagacaagccctcccgcccgcaggtccagcaaccagggagggtgggggctctcttcttgagaaaagtgatgcaaagccctttggatcagtgtgactgggaggacgctgctgcccaccctggcacccagggaggaggaggagagatgggagaagaggggctccctggggcaggccaagtgggagggatgtctggggggggtctcggaggaagcaggaagggttggcctctgtggctgtccagggagagagaggaggagcccaggctcccaggcagggctgaagctgggtctgttccccaggttcctgggagggtggccatctgggaagcccaggaggggaggctggaggcccaggggcccccagctactagacggccctaggaaacagacactaaatcctcattacaaggcttgttaaatgcacagacaggatattagcgtttaaacagcttctattactccagggcaaactttaaaaaacataatatttatagaaagcctcattcagctcaccctgtttgttctttatttctctggcaattaccgctaatttggagacgttctgccttggcatcttcgcctggtgccggtcaattatgaagccacccgctggtgctgcccccacacccgtcactcctgcacaagacccagcggctgcagggcttgggggagtgacatgagcccaccccctggctccctgcccttccccttcctgggcagggcaatgttcacacaccccaggccatcttcctgtgccatctgtttgtcccatcgggttggctctgggggaagtgggagggaggtgctggcccccgcagggctcccggctgaagctcccaggccccagactgcatgctgccgccctcgtgcagctctgagctgagcccagcaacgctgaggctgtaggggcagggaggtcctccgctctgggctgcagccccgtcaaccaaagagtcacactggtttccagacctatgaatgtgaccgtggtaggagacgcctctggaaagcaccctactcatgctcagacgtgtggcccctgctctgccatgccaaggacgtagcactgtcaacacgctccctctctccctccaacctcccttcctttctccatctgttccttgagtccttgccaagcctctcccctttccagggcactgctgaccgaccactcagactcatctcctgcccacacggagctcacagtcagctggtgccctgggtaagacaggcacccctggtgtgcggggactcacagaagatggaagggcagggctcagggaatagcacatagaggaataaactggtccccaaaggctgtgcatggctggacgtagcccagcaggagcgtatcccccaggcttggctctgctgtaggcagccatgccacgctgggcaccgccctctctcagcctgccctgaagcggagcacccactgcctcggtgcctgctgggcacactgccgggctcaatgtgtcctttgcttttgtccccaaggcagtgggaagccactctggcggctgtggatgctggtgcaggcatttggacgtcgtcctgagggttcctgagtagaggtcagagccagagtcaggtttaacccgatagccttgcaagcagcggacgcagggctggagctgatggtcttggggtcacccaggggtccagcacttgtcccctgcccccaagcgtcctcagcccagcgggggtcaagatgtaactgtctgggctttggagctggagaccaggttctggtcctggacatcacagttgggttggtgacctggatatgtcactgccacctctgtggccccccagctgggtggggagagcagcccagcctgtttgcctcccaggcgtaggtgaggcgagctgagacgccatctgtgaggaggctctgagagccactgtggtctctgcggtgtgtggcattcttgggacacagggtccatgtgaggaagtgtacccacctgacggaagaaggtggagaccatggggaccacggagcaggtggggaggggtctcctggctgggaccacctggagggcctggagtggagatggactggggggcaggcaggaaggaggggtggggcattgtaggagcagcttagaggtaggaccagcatgaggccagggggcaggagtgagaggagggagatgaggagcacgttgggctgagcccagtctcctgcaggaaggaaggtaccatggcccctcaggcccagagcacaggccccacggctggtgtgggcttctctgtggcagtgagcagaacccaggtggggacagggtcacatgcccacccgttctggcgtctccctgtcctgccagcaaatatccctgtcctgcttgaccgggcacagaacacgcaaacagtaattttcacccaacctgatctcactttacagatgagccacctgaggctcagagagacttggtgacttgtccagggtcatgcagctgccaagtggcagagccagatcccagagcaggcctgaggaacacgagtcccctgcccctgccattgagcccactgcccagaccccagcagcctttttacccccggcccctgtctccccaccgtggtggcagccctcctccagggggtatccccaggtgaaacatccgaaggcagagatacccccaaagcaggcagggggccccccactctgggcctctctcacagaacagcagtgacctccacacccttgctaccaaggggagcccctccccgcacggccaagctgaaagggcctgggggcaggttcctccctgcaacccactcttgctttgccaaggccaggccccttggctctgctggcaactgtccccttcacaatgagcacagaaatcattggccgcaagtttgccagctttaaaatgggagcaacaatatctccagtgctgcccttgaaaagccatgcccatgggaggtggagatatgttcactcgaggatgggagaggaggctgcacaagagtggggagccctacagagctgctgcttcaggggatacccctggccaggtcccatcctgcatctcggaacagactcattctttcaatcactcactcgttcatttcagtgttcagtgttcccagagccccagctgaacatcagacacagggcagataccaggaacaagaactgaacaagacccagccagggtgctcgagggagctgcaggcagaggggagatggaggggtgaatgggtaacaggagcacccaaggatgagggtgggggtgcagaggaggaaatggcatctggctgtggggtgctcagggagggcttcctggaggtggtgacagctaagctgcccttgactccatgcctgcagcagcccctcatgtctctgcctgaaagctcaccctgaagtcaagcaggagccagttatgggggtggggtgggaggcagggtgtttttttaggtggaacaagcccaaaggagaacacggcagatgttcagattaaccttggagcagctcagcctggctgggccacggggcttagggaggagccggaaggaggtgcggggtgaggtggagctgagagggcagggtggggagaagttagcgctctgtgttacgaaggtgagatttgatcggggcaggcggggctggggctgggcctggaagctgagtgggaagtcggggtagagggaggcaggacccactctgggagctggggtcaggtggacggtggtacccactggtgatccgcagggcaaggatggagaagccagtctgaaggaaacagcagttttcaaggctcatttttgagtgtgagtttgaggagtgtgtgggcatcaggtggacaacaggaatcgagctggcgaggctgggagggggtcctggtggggttcggacttggggggtggcagcgtttgggtgccgtctcccacactggggtgggtgacatggctcagggagggacagcaggagaggaggaggatcctcctatgggggcctggttctctgcccagctgcaaatcccagcttggaagtggagccggggatctggctcctgggaagatgagaaggagaggctccccgatcaggttccgtcccatcccaaaatagcctggaaggtccagcaaaggagcactggcccggcccccagggcttggccgagcgtggctgaggacaggcagagcccctgctggggagagggggagttctgggaggaagacccccagaggagcccggcaatcagaccctaaccagagacggaagccccctcccacctctgaaggggctcctaggccggctcacacacgccaggtcagggccgggagccgagatgcagggaggtcagggaacagggttccattctgcctgcaggctcagggaatgtctttggggaagtggtcgctgaggctggccttgaagaatgaggagggggactagtgggacacatcagggcattcttggtagaaccaaaggcctcggtgcagacatggaggccggagcacccgggcacatccttgccccaattttgccctgaatgggagcagagtcagcaaagcacagcagagctcagcccatggggtgaccagcggtgagcttgaccctcgcgattctgactcccaggggccatccgtcccttctccacggctgccatggctcctgcggcctcagcctgctctgcggaccccctgctggacccacagtccagctgcttggtgtgggccccacaggcacctgtgcggggtcaggccctcccagtggggctccagggcccttgagcccttctcctggtgatggggctggactgtggccctggagttccatgctgcagggtagattgtgtctggacccagaggtcaggctgggaaggggtacccggatgtggggttgcccctgcctgggaagtgttcctgggctgaggctgctggctgggcacaggggaaaagttcaccctacacggaaagcacaacaaattcacacagatttccaaaccacttctgcgcaagcctagaggctgatgatccggggatatgcagccttctccaaagtgtgtgcatgtgcgtgcgcgtgcacacacacacaaagacacacagacacacacacataccctaaacctttccttcttctcccagttccgcccagttgagctaggatggcccggtcctcccctcactgtgagggccccttcctgcttggcctcgcctggtactgccccttcaggcctgtctggcccagacccctaccctgatttttcatttcctttgccaaaaggcacaggggctcgcagaggaaggtgggggaggctgcagagtgggggcgcctactctccccagggcctctgcaagctgctcgtgtctgggctcagagctccggggaggtcggctggggctcacagccatgcttcaccactccttcccagggtccggtttcccacacctgattttgtttgggaagcgggaggagtaaaggcacaggataagggggaggggagcttgtggggctggggctggtgtgctgggttcctgggagccatctgaagtttgggctagtgtatcccctgccgggtattactggaggctgggcccagccccctgtcccagccccctgtcccagccccaccgtctgcatccgaggcccacctagaacagtctggccgacagccagcacttcctgtctggggacacctccaaccggcacccctgcctgctgggccctgggggaagggtggcatggcctgggaaggcacggggtgggggggtggggggagcacgctgagcttcccaacatttcagccccagatctgcccagagtgagaaagcaacacgcagtccacgcttggtacatacccaaaaatacatcatcatttcggaaccgcggctccacagcaggctcccggggaggaggggaggagacccaatcagggaagcggccgctggcggcaggttggtgggggtaggggcttggtcccccaacgctggcactcagtttagctgtcacttgcagctgtcttaggaagtgcggctctcctctctgcctcccgctcgctcctgctcactccaggtcctctctccctctccctgtgtctctgcctctcgctttatttccccaggttgctcagctccgtgcctgctctccgctcgcccatcgatggggtcctgcccggcactgccctgtcgcagtcactcctgctgcctggatctctgttcagagttgaactacagcgtcctgattccagcgctcatcaagcaggggacccaggggagggtgtgtgtgtgtgtgtgtcggggggacacaaaaccttccagcctagcagatctcacggataccggaatggggaggacactttactgaaggttagaacaattctcataaggtccctcttggcttcagagggtgggagatgagatttggaagggccagagaggtgacactgcctggagaccccagccccaagttggagcagcagggagggaggagaagcagctcctgcagaggcggggcggctctccaggcctggagcgtgggccaatcagagacgaggcgcagaagttgaatgtgcattgggtgcagcaggggtgagagggtggagtgcagggaggtggggccaccgcctgcaggagagcctgcatctaacgtctgtcctgcctcagcgttttccaggacaccccatccatgagggactccgataccttctccactaacccaccctgctgggggctaggacctttgaggactcactgccctgcagccaggatttccgctcagccctgccgaaaagccgatgccggctgagcgctgttgacagaggcctctcagccgacctgcctcgctgcccatcatctctggccagtgccacccatgggctgtatacagccagggacccaggcccagggcccggtcgggagcctgctccaccatcggcctgaaggccagagcccacccgggcggttgcctgctctttgaatagacaaaagagacttctttctatggttctcagagtttcttccaatgagcaacaatgaggcccagaggccggttagtgttggggtggctgcaggcgggtggctgcgtgaggtctcatgtgctggctctgctctcatgcttccactctttcctctggagagtgagagagtgatgcaggttggggggcctcttgtcccccttgggcctgcattggtggcctcaagggccagccctagactaaacacccaggactttccttccctggagggtaacttgggtcccccaacccaactgtgtccagctgtggtaaggtggggtccgggcgaattcatgatcgtcttcagtgagagcccacccagacccacagaggtcttcccaccctgtcactccttccatggggacctggctgagtggaaggagggctcgctgggaaggaggaggtgggggtcggtggctggagcctctggctctgctccctggctcccctccaaggccgccgcccatagctctctggctgggcaagcccaggggaggtgacaggatgcaggcagcagcatcagctttgagtctctggggctggcatggatgcctggcaggagcggggaagggtggaggtgcagatggggaggggtgcagagggcagaaatatgagttgctcatgttgcaagctctagaatgagactgcccaaaaacctccaccagccacaaacacctgagggtaggaaagcaggtgttccaccagagccgatgccatagggacctgctgcctgatttctacccgttgcctgatttctacccattgcctgatttctactgctgcttgatttctacccgcagcctgatttctacctgctgcctgatttctacctgcagcctgatttctacctgcagcctgatttctaccggcagcctgatttctagcagatctaaagccctttatggctccctggggatccaacactttgtgctagctcatgccaaggaaccagccctggccagaaggtacagaggcctaagatccatctaaaccaaacatttcccagctctgccactgccagtcttgcagcctctgtgggctgcgtcgctgctctccaccttagtgtcctcatgtctaagctgggatggcaggacaaaccctgctccagggctgtttggggaagctcctgttcttttgaaagggccagagctctggggactctgagttggcacaagcccctgcacctgagactctgagcagcattctgtagccccttgccgaggccagtgagcagccacatgtcctctcgcacgtgtccagaaagttgagctttgggctcagaaagctcacaggacgacaatgcccaccagagatggccttgagcccctcctccatgtccccccacacacagccttgtcattgcacatggactgggctgtccctgccctgggcacacaggcacctcctagagggcaggggctcagccacacttgtcatgtccagggtggccagcatggtgcagatgcccaaatgctggctgtggggctggaaagaatgaagaggtggccgggcatgggctgggttgctctttggggagcacagggtgagaaagaagcagtttcctctgtagcctgtgtcccccgggctccattctggagggtctgtgatgacagtggtgaatttctggctgcagctctggggtgtcagggtgtgggtctgccaccttttcctgcatgccctggggacctgcccatatggccagtggcttcctcaaacaagctgcctgtctcctgcatcctctaaattctggggtggccactccatcaccctcgaaaaatgggctcacaggcagggcctctgccaagttaagttccagtgtttctgctctaaaactccacaccttgagtgcacatgtggcaacagcagacagcacacacagttgcctgtgtatctgtacacacacacggtccccctacacacacacagctgcatatatctgcaaacacacacatgcacggatgccctgatacccctgcacacgcacacagctgcatgtgtatctgcacacacacacatgcatggatgcccttatccacccccctcacaaacagctgcgtatacatgcatggtcacatacacacctctgcacgcagaaccttcccctggaaatgtaccaatgtggcagccccactggggcaacccccagtgagcagaccacttccacacatgccctggaggtcttgggcttgtccctgcagatcctggcatggaaacccgaccctgcacttgggccaggctgtgacatttgccacacattctgcccacagccctcaggccagtggcgtgagacatggagaggatgcggcatcctctggtcagaacgccagcagctatgaataaataatgatgaagggagaagaaagaggggccggggtgcaggacactcccccaccgagggattctgaggcctgggcagctgtcctgggccgtcgacacattccaagctcagctgctctgtggcagtgcgccccccctacagcacagcactaaagcaaacaacactttcaataattcagcagcaggagaggggatttaggaagggaaaatccacctcagcattgacagaggggccaagaggaacaaggcaaaggtgtgtatattgggaggcaaaggtgtgtatattaggagggagggagagacagcagaagggaagatggcaagcacgatggaaggcaggcttgaatgccgcctcctgcacacctcgccagttctctgcgtgtgtcctgattgagagtctctgggcagattcttctttcccaaacagtaacatatggtggtcactgaggcattaactgccaccaagagcctccggagtcacctggcctctccccttccaggacataggaaattcctctgcagcctccccaccgcagatgcctccaaggaccaaggacagggaatccaggcagcccacccgatggctgccagctgtcatggtcaggaagttcttctttcagacagcctgaaatccatctcccccagactctcctcattgatcttagttccgccatctgaggccacaggcattgtgtggactttcccttccacaggccagcccttgagctttccaagacagatcaaccagctctttcctcctctgggcacacagcgctggtccctggggccatttcctttagggtgcatttgggtctttaccccgtcttgtccacttggctgcgaaacatcccctggcccatagctgggaactccagggtgaaactaacattccaggtggccctgcggcccagggatcccctgaggtgatccagagtggaccttacccatgccatctaaacagagtcagcttggagggcagccacttagctttggagtcatcgtccctccagcttcctggggacacaattggtttacactgtaattattaacagggctgcagtttggaggatgtgtcatctggtcactctaattgtactgaatttgtgatcagtgacagcccctgagtcttctttctcttgtactcatccaactggtgtttttggaactcagagcaagattttacatttagtcttgttacatttagtgaatttcacccctggtgctagccagctaaccaggaaaactattagttattcctctcatctttagaagaataagaatttgatcatcatgcctactaaatgtttacataaactgctggtgaaaggcatgactagcatagggttgagagcccagccttgtggcgcaccattagagacaccccaggagtcagtgccctttgaccattcacacacgtcacctatgcaaaacatgcccctgcctttccaccatccagtcttcagtgaaaggtgaccagcacgtacacagcccacatggcttgcacagtcaacctctctccctctttggaaagttcggctgtctcccaatctcaagcttcctccctgggcatctctcgctggccagtcccctccccagcactgctgtcccctccctccattcttttttttttttttttttagacagggtctcactctgttgctcaggctggaatgcagtggcaccatttggactcaccgcaacctccacctcccgggttcaagcgattctcatgtctcagcctcccgcatagctgggattacaagcatgcaccaacacacctggctaattttagtatttttagtagagacgggatttcaccatgttgcccaggctggtctcaaactcctgacctcaagtgatgtgcccacctcagcctcccaaagtgctgggattaaaggcatgagccatgtgcccagcccccggatcaattctgtaagtgctcagctgctggattgactctggaactcctcacagccaaggggagcgtgtgtccatgcctcgaggacccacagaccccagctgggtagggggctgctgggcagagccggagggggtactgggtcccttctgcctcagcagcaagtccacaaatgtgtgtgaggtgccaactgcaggctgggcccattccacaccagggacccagctttgaaccaaacaggttaaccttcctgcactcctgggctttaccccgtactggggaggagagtcaacaaacataatttagaaaattgtcttgcatgtcaaagggcgacagtggtgggggaagcaggatgggggtgtgggagggcagaggagggggctgcagtgttcagccaggtggtcagagtaagtgtaattgatgaggtgatgttcaggcccatctggataggcccaaagagggggctctgaggctttctggggagaatattccagcaaaaagaatatccctggcaaagggcattccacatcatgggatatgtctagctatttggggaaccagcaaggtggcccatgggctggagtaatgagagtgggcaggcagcagtgggagaagtggtcagatcataggaggtcctatatgggagggtattgtgaggactttggcctttctccaagagaagtgggagtcacaggaggatttggagcagaggaggagtgcagcccaacttgggctttaaccgtattagcgtcaccccaacagcacattccctggataggaagtgggccaggtgtctaaagatggacctcatgaccatctttgctcagcctgaggattttgtaatggttggtattcacggggaggtggggatggcttcctggcctgatgagcagtcacctgcctgctatgcttcccaccgtggtcaagagaacgcatggggtctgtgactgcacccagtgtgtcctgggcatcaccctgtggagcaggaggagcctgggatgtggcaaaactcagacctgagctcaaattccagaccagccactgtcctgctgggcagctttgagcagattacttaacctttctgagcctctgttccctttttggtagagtggggatggcaacatctaccttcctggggtgactatgggggtttagcagtcaccaaggtggagggtctggcacacaggtattggataaaaaatatcacattaatcaagggacatgggcatttgcaggtatgtgagttaggaaagagggagcgtgaggctggcaaatttctacaccagcgtgagactggataaggacagactccagctctgacaagttgctcgggaggctctgggacctgccaggcctgggggaacccactaagcattctgggcagggacctctcactctggcctgcgcggagcatctgcagaagcagcagaaggctgcggtgcctccaaccccgccttgctcccctttctcactcccgtgtctcttccctccctccttccctctccctctaacttatctgcaagcgccagccagttggcaggctggacactcagcaaaggagccatggagacttcttgctggttttggccgagaccaccagttttgtgtgttgagtccccagaggcgaattccagcagaggagggacaaagtaagtcctgagaggtccagcgaagcagcgagccagagaacatccacagaggcaggttgggcctcagtttcggagtggtttccccttttcctcctgggctggtgtcctttgatcccatggaccagatggaggtgtccccatggatgtcagaaatccagcccacccctaagagggggtgagtattgtttgagcatcagctcgtccagggcaggggctttgtttggctccttgttgcatctcaagcatgtcatttgtgctcactgcacaggagatgagcaggtctctgatgccagtgggggactctgccatagagaaggattcagcacagggccccgctcattcccggctggctgggggatggcggcgtggggaggctgactggcggcggttactcactcttccatggcttataactggagcacatgtgatggccaagaggcaaaaagcaaagtgcccaggaagaccctgaccagcctgagggatgcaggcaggtggcctcagtgtccaggtgagggtgggagaaatccaggggcaggggaaggtaggctcggggcctctgtgttggtttttccttctgagctggtaatgccaaggccagcgaggtcctgaattgtagccatcacattgcatggacctccactttgcttagtggggagcagataggtactgcagctttttagccaccaacagcgataaaacccaccttctttgtggacctccccctacgaatcctctggagagacaaggggccctgcggtcagcgtcaatgtaaggcctgcagggtcagaaggacccaggtgtgggcagccaggctggccagggacgcatgtcttccctgcccttcctccgtaggacggagcctggcctgctcctccttctaagctgcttacaggtctctctcgtcacctgttctgtcttaagtgggattgtgtcaagacctcactatctcgcctctcctccctggcgctatccgtgggctctccgtgttccctccggcctgtgccttggcaaagctgtccgctccggagcgggcggggtggccatgaagcctgagagagaggtgtgtgtcctgctctctgcaccgtgacgcctcccgctccctgaaaaccagggagaaattactctgcccaagcggaacacgcccggacaagcctcctctccagctgtaattaatactctggggaaaacacagacttggggttttcatacttccacacaaacacacacacactcacagatttctttccattgtcctccgatcccatctcaaatgtttaatgtcctgcttctttcatgggtagcacaaaaccacccaactggatacatccagaaagccaagggaggcaccagggaccctcttcaggttccgtgatgcagaacttgagcgtttgggagctgatttgccaacaagcagtgcccaggctgcatccctgacgtggagcaaagcagctttggccttctcagagtcagaaatagccgtgagtttgggttaaccctttgtggtcaacattctggggcattgctctttatttcccccatcacagtagcctaactgatgcgctagtccaaacacgtgtgcgcataccaagcgctcctgccacctgactcattacaaaacactctggtgaggcaggagccttgcagttccatgaagctaggcagctggcaactctgatattggaaatgttctctcaaaggacaggagagggccgggcgcagtggctcatgcctgtaatcccagcactttgggaggccgagatgggcggatcacttgaggtcaggagttcaagaccagctggccaatatggtgaaatcccatctctactaaaaatacaaaaaaagtagccaggcgtggtggcatacgcctgtaatcccagctacttgggaggctgaggcaggagaatggcttgagcacggtaggcagaggttgcagtgagccgagactgtgccatcgcactccagcctgggtgacagtgtgaatgagactctgtcaaaaaaaaaaaaaaaaaaaaaaaaaaaaaaaaaaaaagggacagggctgggcgtggtggctcacatctgtaatcccagcactttgggaggccgaggagggcagatcacttgaggtcaggagtttgacaccagcctgaccaacatggtgaaacaccatctctactaaaaatacaaaaaaattagccaagtgtggtggtgcacatctgcaatcccagctactcaagaggctgaagcaggataattgcttgaacctgggaggcagaggttacagtgagctgagatggtgccactacactccaacctgggtgacagagcaagactccatctcaaaaaaaaaaaaaaaaaaaaaaaagacaggagagctcaagtgggccaggaagggtggagtcctctgcatctcccactggtcagagagctcctttggggtggcatgaggaggtggggatgggaatgggctcagaaatccaaacccgtgaaatccacagtctcctacagggaggcttgacttctccagggaaattctcagtgtgaaaagtagcctgaacaaccaggactgtggtcttgccttggccacttccaacgtgggcctgggtgaataatcgacccatcctaagcctcagtttcctcatctgtagaatagggacaccattcctgccttttgaacaggcctgttgtacggatgacatgggacggcaggtttcacttgtgatgacctgtgtccaagctcctaatcagctggagatgctgtgcccagataaaggattgggtatgtccgactcagctgaggcaggtgcagggaccatgatttggaagaccaaacaggctcagcttctcatgggtcctcctcagctattctcactgggggcaaggggggtgccgcccagaggcacagtgacacgcagtgatgatgaggctggttgggttgccgtcggcctctaggttcccttctccccagttttctcatgttcctcaccacccagtctttgagaggcttggaggcattgtttttctctcactttctctccatatttatttatttatttttttgagatggagtcttgctttgtcacccaggctggagtgcagtggtacgatcttggctcactgctacctctgcctcctgggttcaagcgattctcctgcttcagcctccagagtagctgggactacagtcacccgccaccatacccggctaattttttgtatttttagtagagatggggtttcaccatgttggccaggctggtctcgatctgctgacctcgtgatccgcccgcctcggcctcccaaagtgctgggattacaggggtgagccacggcacccggctctccttattctttacaatcaaaatgttcctgagaagaaacgctgtgaagcagtcttgctaagcctttccagagctaagttccggctcctgcagagccctcatcattgaggagaggaggctgttctcaaggcatgggaagcaaaggtgcctgtctctacactaggactgtgtgtcccaggctcacgagtgcttctgacagccctgtagctcgtctccttccaccctgcaggggactggggacaagggccaggcccagcctgtgtatgtgcctgggtttgttccagcagccgggcagttactgcagagacagatccggtgtaaagaagaaaacagttctgcttctggtcaagatggagaaatggggactgatgtgcctgcctccgagaacaataacaacaagctgaagactagttttcaagacactggacgagatacagtgaagggcagtgatcccccagtgctggtcatagaggagctgcacagtcgtcccagctgactgtcttgaggaagttttcaggccatggtgcagtgaccccaggtcaagcctggtgtactccctgagttgaggagacagagctgagaggtggggagccaaggtggctggagttataagacagagcaatggggagaagacagctggacagagaaagagctctacagatactaagagggtcccactgagtactcagctgagtactgatcagcacaagctttggagaaaaccacccaaggttgaggcgagaaccccctggagggatgaaggacacagcactgggcaccctcacagggccagagtagctcagtcctcactagtcagattggaacaggaactttttactgttcatggggcactgggtagagcatgcagagccctgccttagtagcaagaacaatcacacctaggataaatacagccctgggcatatcagggctgtatttattgtagaagaaaactgcctttgttaacataatcatttatatagaaaatctgacggaattgacacaaaatctactagaactagtaaatagatttagcaaggctgcaggacacaaaatcaatgtacaaaaaatctattttatttctatacgctagcaacaatcaatcagaaattgaaagaaaaataccattttaagaagcattaaaatatgaatgacattggcataaatctaagaaaagatgttcaatatccatacacagaaaaccataaaccattgatgaaattaaagaaattctaaataaatggagagaaataccttgtttatgagtcagaaggcccagtattgttaagatgtcactgatcgctgtattagtccattctcatgctgctatgaagaaatacccaagactgagtaatttataaaggaaagaggtttagttgactcacagttccacatggccggggaggcctcaagaaacttacaatcagggcggaagacacctcttcacagggcggcaggagacagaatgagcgcaagcagggaaataccagacgcttacaaaaccatcagatctcgtgagactcacccattatcacgagaacagcatggaggaaaccacccccatggtccaattacctccacctggccctgcctttgacacatggggattacaattcgaggtgagatgggcatatcaatccctcaaactgacttatagattcaattcaatcccgatcaaaatcccagcaggcatttttttttcttagaaatttacacactaattctaaaattcatatagaaatgtaaggggcctagaagagccaatataactttgaaaaagaaggacaaagaacaggaagattacctggtttcaagacttactaggaagccataacaatcactgtaatagctgtggtaggactggcatcaagacaggccaacagatccaagaaacagaatatcaaacccagacatagactcacatacacatgacaactgatttttgataagactgcagggacaattcaatgggggaaaggatgatctttttaataagtaataatgaaatcattggacatccatatggagaaaaataaacctcaatctatagcttgccccatgcacaaaagctaatttgagataaatcgtggaactaaatgtaaaacctgaaactatagaagatctagaagaaagcataggcgaaaaaaaatctctttactttttagcaaagaagacataataaatgccaaataaccatacgaatagattctcaacatcattagtcactagggaaatatagattaaaaccccagtgagctaccgctacatacctagtcaaatggctaaagttatgaagactgacaacaccaagggttgcggaggctgaagaactgcaattctcacccacgactggtgggaatgtaaagtcgtgcaaccactttggaaaaccgtttggcacttatttagggcgttaaaatatacttaccttgagatccagccatttcacccaagagaaaacaaagaatatgtccatgcacagacttgcacacacatattcacagcagctttatttgtaacagccccagactggaaacagcccaaatgtccttcaaggaatgaatgagtcagcgctttgtagctcaatcccagcgtggaatactacttggccagaacaaggagaaaagtatatctatgtccaacatcacagaggaacctctgaataactatgaggagtgaaagaagccaagcaaaaaatgaccacagatgctacgattctatttatataaaactccagaaaatatacatattctacagcgacaagaagcagagtcagtgcttgccttggaagaggggattgggtggggtgtgaggaagagattacaaagaggcacaatgtaatggttgggggtgatgaatacatccattatcttgattgtggtgatggtgtcatgggtatacatatatatcaaagcttatcaaattgcatactctctgtgatgtttatcatacccccaatgtacttcaataaaactatttaaaaaaccaacgtgcaaaaatccaagtttacgggaccaggcaaatgactgcattcttacatagagtgcaaatggattcctttttttttttttagacggagttttgctctgttgcccaggctggagtaagtggtgcaatctcggctcactgcaacctctgcctcccgggttcaagtgattctcgtgcctcagcctcccatgtagctgggattataggtgcctgtcaccatgcccggctaatttttgtatttttagtagagacggggtttcactacattggccaggctggtcttgaactcctgacctcaggtgatacgcccgccttggcctcccaaagtgctgggattacaggcgtgagccaccgcgcccggcccggcaaatgaattctttattctacaagtgactcacctgggggctccttccgatgcttccctgtaaaatagattcagtttacagcggtggcatctcaggaggcggctgtgacggctgctgccctcctcgtggtgaacacttgcgggcgcctgtgaggccaacacccggcggccttcctgtctactcccacggaaaactgcatctaaccctgacacacacaggcagccactcggtacgggggaccctgttacacacggcccactgtgggaagcctgaggccatgtgaaggggaccccctgggctctgtctctttgtcctcttcctgctagaaagccggagagccggcagcagagcccgagctgcctctgcccgcagccctgagtggctccgaggtgacctgcttctaggacggaagcacccggctcaggtctagcccaggtctagttctaatgtcaggtctagctccaggccatctggtcagtgcccacttctgagccaagggcgggcttagggcaaacgcggtacaaaaaagagtgcccaacttttctagttttggctgaagaagacttcatacgctgacggatctagtttccggtcctgatttttgaaaaacgcagcgctggccttgtgcacacaccacccaaaacccaggacctagcgaagagaggccacctgagggccgatggctgcattttctaattttgttcacactaaatatacattacagatgatctccaacttacgaaggtttgacttacgattgactttgaatttttcaactttatgtttgttgggtttattgggggcattaagtgctttttttttttttttttttttttttttttgagatggagtcttgctctgttgaccaggctggagtgcagtggtgtgatctcagctcatgcaacctccgcctcccgggttcaagtgattctcctgcctcggcctaccagtagctgggactacaggcacccgccaccatgcccggctaatttttgtattttttagtagagatagggtttcgccatgttggccaggctggtcttgaactcctgacctcaggtgatctgcccaccttggcctcccaaaatgttgagattacaagcatgagccaccaagcccggtccattaaatttatttttgacttacaatattttcaccttatgatgggtttatcaggacacaaccccattgaaggtccagaagcatcatacttgtataataatctccccaaagtaaactctgcaagtgaatctgtggagggggtcagccacaggtgggtaatgggggttggaggtacagagcaatggaccaatgggctcaggcagtagtagccagtcccccagcgagggtcaacactgggaactgagctggtatccgaagccccttccccgaggagaccaggccatggagatgagttggaccaccctggaccagcaagctggggctgcctgaggaatgggtggccatgcgcggagcacctggggtgggggaccttggggttgggggagggaaaggatcaggaaggcagtgacattgcttctcaggccagccagaattgcctaaaaacaatcgtcctccatccttaccccatttatccatttccctttcagcccctccggctcccagtcctgcctttcccagcacattttgggctcatccatgggggacaagagagaacacgacacagaggtgctaaacggcgccaagccttccctccacagcccccaaactcttcctccctccagtggctgggaaaccccagaaactcctggctttcattatcagcagctcccaagatgttcaacatgctcatatctgtcaaaaactattcaggaaaaatagagaaagtctttataccttttattcagccaattttccccgaggcactctgggctctctaagaaaagaaaaagagagaaaggagagagaatcacaatcaatgttgtcatcatgcatctggttgctggcgatgctatttgctcatcgactagggaagtctggaggtggaagcatcatctccctgggagtccaaggaaacctgcctgggttaacctctggctgccgtctgcatctcaagcatggctgggaggcggcggttagataacaggcagagataaagcaaaacagggcacggtggaccggccacccagaggtttcagactcattttctctgcgactctggatgttcctttttttcccccacctcaaactccaagcactccccagcctggtttgaggttgtccacaaacgcaggccttgtggcttgttgatggtgacgtttagtttcacactgggtttcctctgccatgccgtggggatttgcttcctcctccaggtgtagggcgggggtcactttgagtgtggtcatggcatgcacattcattttatttatttatttgtttttggagatggagtctcgctctgtctggaatgcaatggtgcgatcttggctcactgcaacctccgcctcctgggttcgagcgattcttgtgcctcagccgccctagtagctgggagtacaggtgtgtgccaccccgcccagctaattttttgtatttttagtagagacgggggtctcgccatgttgcccagggtggtctcaacctcctgagctcgggcaatccacccaccttgccctgcacattcattttatgttattaaagaaaagttatttaacaaattctaaatcccaccaaacacataattatagaggcaatcgttgtatgttattgtgaatcaggtgcacctaccagcagcaggaacagctcagtgatacggacagactggcaaggaccaccactcactcactttataatccagggcccggggccagggtatccactcctgcctaagtcacaaagctagctcactggggcctgggactccacacgagtgcctggagaccttccttttcttagtaggtcattgaggagttcagaaacaaaggggtgtgtgtatagtgtgctttaaacaaacttagatttccttcctttattttagtaatgtttcataattttctgtgtacatgacttgcacattttttaattgtggtaaaatatacataatatacaatttacaattttaaccattttcaaatgtacaattcagtggtattgagtgcattcacactgctgtcaatcactgctgctctctgatgcctgaaccttttcgttgctccaaaaagaatatccatacctgttaagatgccactccctgcccccagcctcctgtgcatatgtgtatgtgtgcgtattttttaaaacttagtgcaaaaaataaaagcaagtgaaaagcttctggaattgaaagacggtcagactgggcctctttcttcagatctagaaaaatcaccaccaccgtcttcatccacatcactgtaaaaaggttactgcggtcgtttagtttgcatggtttatgagccaggcaccgcctgtacattgcttcattcagccctcccaacagctctagcaggcaggtacacttcttactcttcccattcttcagataaagaaaccaaggccccagctggtgaagcgactgtggccacagtaactgagtcagctggcccgtcccccagagcaggttaccccatctgcctgtctcacccacaggtggaaagaagtaccccgccctgtgggaggcgagaatgaacgtggccacagaacaccaaaatgcacagggcctgccttccctgctggagtttgtgcagatcacagtggcagtattgggtacttcataggcgggcccctcccagccgcatcagggagggctatgggccaaggagcagctgaacttgaactgggcactgggctggccatttccaaggtggccctgtggagcccctgttctcctccccagtaaaatggcaaaggtaacttctggcccgtggagccatctccacacacagctcacaaaatgacgctgagaagggcaggtgtgattggaaggcactgccagtgagagtcacttcgaaaggaaatgtgtcatctgagcggcttgcatcaactgctgccttcgttaatttgggggatttttttctatttttgagacagactctcgctctgttgcccaggctggagtgcaatggtgcaatctcagctccctgcaacctctgcctctcaggttcaagcgattctcctgcctcagcctccgaagtagctgggattacaggcatgtgccaccacacctggctaatttttgtatttttggtagagatggggtttcaccatgttggtcaggctggtcttgaacacctgacctcaggtgatccacctgcctcggcctcccagagtgctgggattacaggtgtgagccaccacacccagctggattttcttattggtgatttcttttcttgaagtgagttcttcttccaattcaatacaatttgattcaattgaatccagccccactgaacaaacacacagccaggcatttggatctgaagccaggtccagagccttggaagggtacgtctgtggctctgctggaggcaggctcgggcccatgggctgagaaggtgaagcaggactaagccaaagattcagggcttcacctctcttcccgaacacctccgtgtcccctgtcccttctcctctactggcccaggctctatgcccaagcccttagaagtcctcccagcacagtaactcctttcggctctggaattcccagtctttaggccacatcagcccagatgggagctggcagagtagcctgttcaccccaccccatccaacccagcttctctgcctctgccaacccttctctcctgagagattgctggcatttcttgagttctcttaaatgtgtcacacacgtacgagtgtctttatttagtcaaggtgaaatatgtcctacctgcactgtgtgaacccggggttgcagtggcatctggaggcccaggggctgagccacatttcaatcaccaaagagtccccatttttgaaagctccagaactagagggatggtcaaagagccggtcgagcctgatgcctcaaccacagggtccaatctgttttcctggttcttcgggccaggagctccccgagcccagcttcgtcctccatcgtttcacagaacctccagggtcacgaaattccctgcacctccccggaggctcttgtgcatggaaaggaaggtggtctctgtgcagagcagcccacaatttgggagcaaccaactccagtggtggcctggttgcccatccctgggatggtgcctcgcttcgtgtttctgagatgtcggctccccctcctcttctgcactcccagcattttctatgtctctggtccttgccccacctacccaatcctgggggcgggggaaggagagaggccccccaggttcattcccattccatgggccttttggatgacatcccacgggcgtgctcccagggtcatgaaacacggagctgattctcagcctcactgttagcaaacactgctctcagccactcagcgggataatcaattatggtaatttttgcctccatgaatcaggttcatggaggaacacagggatcagcacagtggtgccgacttccccaagtgcacatgcagtcacacccttcagcaaagcccagacagagcaagacccgcctgccaggctcaaattgtctccacactcccagagtccactccacactgcccactgcccccaggagacggcggggcactgcacaactccacactcttcctgggggagcagggagggctgtggttggggtgagtgcccaatgtggagcccctggtctgctttcccactagactgtgatgcccccatgggcagaggccatatcttagaggtcctggtgtccccagacactggtgtggggccaccatggaccagaggcagtggatgtttgctgaatgaatgaacaagggaatgaaattgtaacaggtaagggtttgactccagaggtcagagctggacccctgttttgaagcatgggattggacactttgagaataatatttgctcttggggaatcccagccacggatgtgcatttatccacctggagaggccttttctcatgttctccctttctgtcctgtctctcctttaggccccttgattccacctggctcacagttcaacttcccaccttcgcactagtccctccaaagacgagttccttgtgggcttttccctgcaattctcctcaaggacatgtgattctgtctttattgaactccatccaaatgacggaagtctcccacctcccaaagcctttaaccctagctgtcttctgtccataaaacatttcattcttcagaaattaaactggggcttgcttgtgtggcccttgaaatgaaaagcacatgtgttccttagtaaaactcatcgttagtggatcatgcaagacaactggccagaaaaaaaccgctcatgtcaaaatcagaccactcccactcattggtggcccttcagcttagctgtcacacatacatcccttctctcccaagatagatgcaagttacttgattatggggaaggtctagaaaggcacagagcaagcggaacgtggatttctgcatggatgtgtccccagctctttgataaagtcaatttcttagcagtggccatcatgtctcttatttattgagcatctactgtgtcaggcactgaatatacatcattgacctcacgtcagccccattagggacacattcctacccttgataccaagatgagagaaaggatactctgatgtttctcctggtctgtttcactttatttttaaaattgttctttttatttttttgagatgcagtcttgctctgtcacccaggctggagtgcagtggcacaatctcagctcactgcaagctccgcctcccagattcacgccattctcctgcctcagccttccaagtagctgggactacaggcacccgccaccacacccagctaatttttttgtatttttagtagagatggggtttcaccatgttagccaggatagtcttgatctcctgacctcgtgatccacccacctcggcctcccaaagtgctgggattacaggcatgagccactgcgcctggcctaaatttttcaattaaaaaaaaattttttttgagcaggatcttgctctgttgctcaggctggagtgcagtggcacaatcatagctcactgcagcctccatctcctgagtttaagtcaccttcccaccttagcctcccaagtagctgagactacaggcaagcaccaacatgcctggttatctatctagctatctatctgtctatctatttaatctttttttttttttttagtagagatgggaggtctcagtatgttgcccaggttggtcttgaactcctggcctcaagtgagcctcccacttcggccttccaatgtgctggggctacaggtgtgaaccatggcatccggcctgtttcgctttaagtttgagccctctgcgtaacaccatcctgcacttctggggaggtgatatgtggagattccatcattttgggacatctcttcttaactccattggcaaggacaactgaatcagccacagatgatggctgggaagaggggcaaggaaaaatggggcctgtcctggtgccagggttcaggggagcacaactaactgatgttgacgtggaaggtgctgaggaaggtgactctgtgctgaggaaggttccactgtgaccacgtggaactgtttgtgcgggaggaagcttgactgtctgaagcagggagatggtttttgtcactttggctgccatgataataccatagactgccggcttaaacaacagaaatgtatttctcccagttctggaggctggaagtctgtgattagggagcagtgtggtcaggcgctggtgagggctcttgtcctggcttgcagacagccgccttctcactgtgtcttcacatggcaaggagacagcgtgaaagcagtctccctggtgtctgttcttgtaagggcactaatcccattgcccaagggaccctccctcatgacctcatctaaccctaatcacctcccaaaggtcccatctccagatatcatcccttagggagttagggcttccatataggaattttggggagtgaccgacatttagtgcagcacacacagcttccacgtattcactcgattctttgctttctttccttccatgttttcctaaatgtgcagtgacggtgcttggacctagtttatggtcagagtagatttatttggcattgtacgagttcctgcagcagaggcactggtgccaggaaagaccttgggagctctggttcccagcgtgctgctgctgctggtggagggggtgctacctgaggagccccggggtggggggcaggccgtatggagggtcctcgaggcagctttgagaaactcccagtgcaccactctcttgtgttacttcagattttatgaaacgatctgtttgtgctctttccctaaggggagctggaggtgaagggtgcaattttataaatcactataaaattataaaattttttataaattataaaaaatcaactgtgggtggcttaaacctggcttgtgatgacggtgatcagagcaggagagccacatctatttaatgtgatgttttcctccttcttctgaatagaaatttgcctttagagaggaaaggaggggagagaagaggagaggggagggaaggggaagggagcatagggcaggagagggcaggggagggaatctggcttatggctctgagccataaactgtcaccattagggagaccggggagttctggcaggttctggccatcacagtagtccctggagtggctttgggttctgagcacactgcccatacttaggtctgtgggaagggccacccccttactgggcctccacagggcagcagggcagggcttaggggttatacgccgtgctcagagcagttttgcctcctctcccaggaagcccgggcagggctccacagcaacctgcctggagtcccaccttcaaggtccttctaggcactctaggccttcagctgtgctccagtggggccttactcctcctctgcctgcgtggacactgctgtgggccccgtgacagcagcatgcatgcctagcacttgctgaatgtatgccaggctacctgctggggactgtgtttttctggggttatgccattgatgatgtcatttcagctttacaaccaccctagggggcaggtactatgatcacttccagtttccaaacatcaaatctgaagcttggggaagtgaagcagattgccctaaatgccacagctggtagcggttgcagctgagtttgcgcgagacccacctgaccacaaccttgtgcttagagctgattattctgctcaggccaagcactcccggataaaccctggagtgtcagagtgagcagggggcaaaccaacgtggccccaggagaaaacccactgtactccttttgctcattgccgggtctaactccaacctgcctcccaccccagcacttgtgcagcctcaacgcccaacatcagcccaaaccttctgtgaccagttgactcttccagctgtgctgggctttgcaaagcccatgtgcctttgccctggggtgtcatttgggactgtggagtcgaccacagtcaattgcttgggtgatatattagaggttctgtctggtgggatgaggtctgcaggcacctggctgccctcaggtgggagggtgtggggaaggtgctggctttgcatgagcggaacttagcgcacacctgtggactgaactgaactcactggcccacccctgagcacccttgacaacacccaagctgtgccacagacaccatagtgtatcctccacctgtccctgggtcagccaggctcagaaacagaagcccagagaaggaattttgccaaggttgacacagcttccaaagggcagagccaagacaagaaggcgcaatgccaccaagcagatggcagtggaggagacagagaccccactgaggatgcagaaatggcctgcggtcccagaggtagggggcaggtgggaggcccagtgtggcatctctgccctggagcatctccagacaggcaagtttcaggggccagagcccagcactgggtcatctcaacaatccatagacaccctcggccttccacacatgaaggagataccaccgcacagggcagaatggtgtccccagagtccatgtccatccggaaccttatttggaaacaggttctttgcaaatgtaattagtgaagatgaggtcatagtggaacagactgggccctacatccaatgcccggggtcctcatcagttgaggagaggacacagagagacacgcattgggtgagggtgtgtgaggatggaggcggagattggagtgatgtagccacaggctagggcgcgctgaaaactgccaggagacttgaaaggacaaggaaggaacctgcccagaactttcagacagcagggccctgagacacctgcattccagacctcaaggctccatctccagagcagtaagagaataaacttctgttgtatgaagcctcccagtttgtggtcatctgttacggcagccacaggagagtaacccacccaccctccccaccttcagggcagtgccagcgagggctgcgggcgcacagtgggcctggttttcaccccctgcctgcaccctactcactctgggcttgctgggcctggttcccagagcatggtggccctttcttcacggtcattgctcttccacgacttctccatgatgttattcctgaccacacaaacactgtcacaggtgcccctcctagagccttcccttcccttcccttttctttcctctttcttctcccattcctttccttccttccttccttttcttccttccttcctttattctccttccttccttccttccccctctcctttatccctttccttccttcttttccttccttctttcattctccttcctttcctttcccttccctttccttccctccctccatccctccctcctttccttccttcctctcttctttctcccattccttccttttttcttttccttctttcattctccttccctttccctccctcccttccttcctcccttttcttttctttccctccttccttctttctttctccctcccctccccttccctcctctccctttccttttctctttttgtttttcttttctttttgagacagagtctcactctgttgctcaggctggagtgcagggccatcttggctatctgcaaactccgcctctcaggctcaagtgatcctcccacctcagcctcccaagtagctgggtctacaggcgtacgccaccacacccggctcatttttgggtttcaccttgttgtccaggctggtttggaactcctaatggggcacactagagggacctagaggccacatgccacggtggcctcacacaattggaccccgagaaagaccgttcagaccaaaggaccccaggaaaatggtttttcctttgatgtttatttggaagccacttttttggtttgaattttttgtggtaaaatgcccataatataaagtgtaccattttaaccatctttaggtgcacagttcagtggcatgaagcacctcacactgttcacccattcccaccgctcaccccctcagtcctttgtgaggctgagtgatattccattatatggatacaccacattttgtttatccattcgtctgtaggtgaacatttggatttttttttttttttttttgagacacctaactctgtcgcccaggctggagtgcagtggcgtgatctcagcccattgcaacctccacctcctgggttcaagcgattcttctgcttcagcctcccgtgtagctgggattacagatgtacaccaccatgactggctaatttttgtattttagtagagacggggtttcaccatgttgcccaggctggtctcgaacttctgagctcaggctatccactcaccttgacctccaaagtgctgggattccagacatgagccaccacgcccagcagaacattttggattttaatccactttttaagacaatgagaatcacgtcattggccccatttcccattttgcttcagccacgagcatgtcagaaaaaaaaaaaattgttgctcaaccttactggttgtatcaaaaagccccactgcctcattttcctgccctctctgtcttccattgtctgaccttgacttttatctgctgacgtgcttccgtctgattttatgtggctatggcaatggaaaaccatctatagaatgacatggacacaagctgaaacgaccctgcctcaggtcattctccaagtcctccctgatgccacagggggctgtgtgcctccgggagagccaccttccctccctgccttgcagccaggcacagggcacagcactgcatgagaggaacagtcccgcccccgactgctcgtggactgtgggccttggacacctttgggcttccagatttcttggtcacctcctcttgctggtgtctgattacgctgagtgggctgttcttccttctactgtgaacctaagggaagcggagtccctgtctgagctgctctctccggagctggcgctgcacgccatattccctccaacactcagctgagacagagttcagcaatgatggtgtccagatggccgtccagtccccacttggctgctgtctgctgcacctgtccccctgctcccgggtgtggagagccagcctgcctatgttcacaggcacagccgggatgtctctcctatgctggtgagatctcaagacccatccgacatcccttggagagatggaaactctttgagacctgaagaggcaccacctctctgcagagagggatgtggctggaccgaggacgcggcctcccagcagaagtgttgcaggggatgctgggtttggtcctgcccatgtgtggctgtgagcagtgccaatgggatgggggtggggggagaacggcggagacaggaaaaggagccgagttaatacacagggcagacggcaccactcagcacgcaggcagctggagaacgccggcttcttagatgagcgcgtttcattatcaacaatttagacatgtcctttctcctttgggagatgggcaaaatctcatttcctgagcaaatcccctaagaaaccaacctattcattcctctaagattttcagaaatccgtctccatcaacctacttacaaaataaaagtagctaataggccaagtgtgctggaggctggctgctagaatggctggtctgtggagcccacgggagccagccggaggtcctaaaaatgcctaggatgaaaggtgggagatacagccagctcatctccccaccctggctggcttcggtaatgccacaggtagacacacacagagaacataatcgtattttttttttttttttttttgagacagagtctcactctgtcacccaggctggagtgcagtggcaccatcttggctcacagtaaccgctgcctcccaggttcaaatggttttcctgtctcagcctcccgagtagctgggattacaggtgtgcacaccaagcctgggtaatttttgtattttgggtagagacagggtttcaccatgttgcccaggctggtcttgaacttttgacctcaagtgatccgcccaccttggcctcccaaaatgctaggattacaggagtgagccaccgcatctggcccccatgttgttttaatttaaggcaacaactagataagcatttgtagaattagagaaaagcaatgcagagttttgcatctggggaaaaatcacagggtggggcatctccactcttccagctccagagaagagaaggcaaggcaggaccctggctgtgcttggaacttagatctggcggttgatccatgttctgagtcaagctgggatggttggtaaacctcccatgggttactcaacatcgaagtgcctcagtttactcccctgtaaaagcgggggtgacagtaggacccacctctaggtatagggatgaaaggcagcccaacccttagcacagtgcctggcccacaatgggaggaaacagagccacccttagcacagtgcctggcccacaatgggaggaaacagagccaccagaggcagtcacagcaggagctgctcagggctgcagtgagctccggtggggagaccctgggctgtgggtttcacccaaacagggcgaaggggcggggctctcctctacctccggggcacaggagagggagggacgtttggaacaaaccccaagaagacttctgcacctcttggacccaagtgatgaaaaggctggtggctttgttttgtgtgtgtgtgttttttttttggagatggagtcttgctctgtcccctgggctggagtgcagtggcgcaatcttggctcactgcaacctccactcccgggttcacgccattctcctgcctcagcctcccgagtagctgggactacaggcgcccgtcaagggctggtggctttgaagtgattaaaagccaggtgtctgtccctggaagggtggggggtcttagagactttggtgggattcacttgcaccaagatgccttctacccgggaggaggctcaaacctgaatgaatgcaacgtcatttccacgtgttaaactgcactccccaacctaagctagtttccctgggaggtaacgatttttgaaacaaaaccaagagtagctcccatgggcaactgtgggcctgtgcttggtgtcccccacagtgacggccggagtgctttgcacatctcctccagaggattctcaccccacaaccctatcggggggtgcttgtatccctaggcacaggtaaggagctgaggcaatgggggtccccgttgactcactctctttggggactgaggctggcagggagtgttgggtgttgccacgcagagccactcagcatccagcctcacttaccagcaagctccagctccgcagagattctccttcttggaggcctcagagctctgcagctcagcgggcagctggaggcccacatccactgcctcttctgtgggagggcccccgcctgccactcgccaagcccccattctgagctgggacctgcctccatcggctgggatgcggtgcggtcttccgccagcggggccagaacccagagcgaggctgcctcccctgggtcggcaacgccacctcgcttcctgcagctgacaaaggactcctgaggccactaacccttccaagccctgcaaaaccatctctggaaccaccctgaagctagggactcggctcaggaactgctgcttgctggggcgtcgaaagccaagcgcgctcaggtcttcaaagccaccgtttgtgcttgggctgcggattctggctagtgagatgctgagctgtgaacaaagtcagagtccactcataaccacctccctctgttccctgtgtctcggcccgctcggctccaatgctgctgcagtcaccgtcttttattccctgtattctgatgctttgacatctgaagccttgctggccctggggagacggctcctcccaaagtagcagattccgagaggcagcaaacaacgggcttggggtgtgctttttcacctgcaaaccggccaaccagatcccacaccccaagcccctgcctctatcggggtcccatgctcccggagactgtttacctgtcctaatcaccccagagccaggtacagacaatcagatccagccccatagcccagagctcactgaaatgatccaaaccagccagccccaaaaccacttcccctgcctcgcccgttccttcctagggaaaccacagtcaagacccctgcccctgtgaacccccattccctctgcctcccgaccaaacctggtacctccctgtgtgtccctgatgccgagttccctgtctctagggatctgtccctagataggcttcttctgccatgccagtcatttctgtatctgtgtgtcttttttaccccattaaaacaaattccaggtatccttagatccccaccagcctcaccatcctagctgcacctgccggcatccctggcatcgctttggctcttgcgagagggagccagttttaaggatgaaaccgtaatgcttccctggtggtaaggagttccttagcgcttggtgcagctcagaggctgctggctcaaccggattcagagtttccactgccacagccgcgtcagaaagactattactgctcagcaattgcctttcgggattaatacatctttactcacatgatcaatttcagtctcctactggatacggcctcagaagtgaaatgtgaacatggacttctatcacacccatgtcccggtgaacgtccatctgcaactaacccacattgacaagcagctaatttgcagattgtgcctgtatcgacagttgggtttgtttaataatagatagttgctgtcttccctgggttctgttcatgcagaaggtctttgctgagacggaacacgataaattgcgaatgtgtttacatggacattcccaaggccccggggctcgtggtcagactttaaagaataataaaaataatttttgttgtaggaggagttcctgatgagggcgcttaaatgagccgatcactcggcgtgggcaggagcaccatgcagggagacccagcctcactgcttggccgatactcaatgaacatttgcctcaacagataaacacgcttgcttgagcttcatatgccctcccaggctttgaggacctctgatttataaaaataaagcagcgttgaggtgccacaggacagtatcctctgcaagactcccttcggcagccacccctgtgcttggctgtccccgtttctttcttcctttctttccttttctttttctttccctccctccctcccttcctttccctccctccctccctttctctctctctctttctctctttctttctttcttccctgagtttcgctctgcagtacagtggctcactgcaacctccacctcccgggttctcccaagcaattctcctacctcagcctcctgagtagctgggattacatgtacgtgccaccaagcccggctaatttttgtatttttagtagagacggggtttcaccatgttggcccggctggtgtcccaacctcaggtgacccacctgcctctgcctcccaaagtgctggaattacaggtgtgagctgccgcgcccggcctatccctgtttctgatgtgagctcagcctcctcagcagctccccttctcccttgtccccttctggtcctagccacacaccctggatgctgtctgtgccctggctctatccgccacccaccaccaggaactcctgcatgtaggtttacaatccagatctctggcacctcctagatcttactacctggttactggtgccaacgtcactcaacgtgtgggacagagaacagacgagggcctctcccgaaacctcctctaccgctgcccctcccagtatagtcaatggcactaaagttgattcagcacccccaaactcactgaaattgatccagcacccctaaactcattggaattgatccagcatcccaaactcagatctctgggcacaacccttccccctcccttgtctccagtgcccacccaagttgcctctaggtcctatgcattcttcttccttaacaccttctgtacctgtgtgacctccgctacccacaaatccacatggctcaggccccttctcttcctagaacatggcgcggcctctgaacttgatcctggctcagaaaccctacagctcccacatccagcctcaactcagtggccagacgagtcggctgcatggcaggttccgccccattgtacacttcacagctgcccacaggctcagggaaggttcaagacctcttggcctggggctgaggatgcccacacctggcaccaacccacctgcccacctgcttctccctcggctcccccaccaggggtctgccctcaggctgaggagagcgtcttacagctccccagtggccgagctcacactcctggatccttcccctccctgcctgaaaagactgagccctctcactctacccagcagcctcttactcacctggagaccaggtggcctgagccagccttgtctttctccatctctcagcagggaatgagtctgctgaccacgcctcatgcctctggaagcacactttgtcctgggctggcccacaccctcctggtctccccatggctctggcccttcctcctgcctttgcctagtgggtaactgggcattgcagggccccttctccttccaccctttactttctccccaggcaacttcagaggtctggcttcaacccgcaccctgatgccagcaatgcccactctagccgagttccctgtgggtccaaccttttgcttcccttgatgtctcccagactgctctgtcccacatggctgaggctcagggtcttctcccagaaacctggtcctagctcagtggtccctatttcagtgaatggatctatcacccgtccaagtgagcaagtcagctggggtccactctgaccctccctctcttcctcccccatcctccaatccatcattgactgtcagtttgacccaaggagttcgggggcctctagaggctggaacagggaggcagtggactctccctcggaaatgagctctgatggttcctcgatggtaaaccagtgaggctccttcctgacttctgccttccagaactgcaaggccacccatccagctcgtttcaagccgctacgtttgtttgcgacggcggcacctaatgcggtcctcttggaaagttctcagcgtcacatcgctctggctgtgttgaccactcccagccaactgcccctctcaatgcccctctcctttcccttcctttttgggtcttcatgtccacagagagtgaggcgtggacccaggctttctgcctctccaatgagacaggagggcagggagctgaaaaatctcaaatctgccaaccccacccttccccctctatcccgcccggcaagccccagccccctaaacccgcagccttctttgccgtctacactcagcaaagtcaagtccctctctgagcagcctctgcttcccagatggagcctctggccctgaccctgcggggtggtgctgtgtgggaaggggcaagaaaaaggaacaagcaacgcttgacaaggctgtttcaggtcccccttcttctttcagcccaagtagatcctggcggccgacagacaccgcagagggaggtaaccaccactcctcctagcacaatgcatctggtgctccctcaagagctgccaaagccagacggggctcatctttccccccacctcaaatacctgcccttcaccacacacacatccggacacaaagccggggaggactcgaattaatttaacttttaattatattcacttaacaagatgatccagctgaggttaaaaaaaagtctgcctccccgcccagatgaaaaaaacctcttctgtatctatttatatccagtatatacataaccagaaacgaatctttctttatggaccattaaagatctaatgtttaatttatagccactttctctggcggggtatccaggcacaatgtcaacatttttaattaaatgaaattttttttttaaatcacaaaggaagatatatatttttaaagccacatttgagccagtgagcaacagccctgagttgctgcttccaggaggtgctgctggttggagagggtgccggggaaaggggagacatctctggaatttcaaatccctggctggccagtctgtctgcggttagggtggcaggggtgtccccagatgagggcatggcagtgtacctagcaggggaggtccccagctgctgtttgttgagcacctactgtgttttgggcagtgccctagagggttttcacatgccatcatctttaattctcccagcaatggtccacggggtggccatgggatgggattaccacggaggaagctcagagaggttggacaccctgcctgaggtcacacagtagcagatggatgaagagcccatgtctgggtccaggtcaggttcccaaacctaagcacttttctcttcccccacgcagcctctgagggcgggtatgggagggagccttctccccagctggtggcaggacttctgagtcctccatggtgcaaatgaagtcactgcaatgcccaggtcctgggcagggaggcaagttcaccactgcatcgctagcacccaggacacaggagcctcacagaagtcatttgctgagttttgcagttcatgagagtgaaagtgattttccagaaggttctcagatgtcctggcttcagggagcagggcccctgaggtctggaagaggccagctgctgcccagtcctattcctgcctcgttcagaaccctgcccaccccgcaacccccaggtggcagcaggtgaggaaccttactcctgagaccctcagccctagctccacatacccccaaacctgccccccaatccaggacacatggcaccagggcccagccttgagaccaaccagctggactcttgcacactgacctctgaacatagatggagggaagcccttgagttgctaagcctgtaggtgaccctgactgagggttctggggctagagatggagctttgggaagctgagcccttgaaccctcagctggtgaccagtgctggccccagggatctcccacctgcttgggttggtcttatgccaccaggggccacttctgagccctcttggcgattcgtatacttgcccctccatgcagtgtcagtccaggctgtgaaaaacccgccctgcctgagtgggtgccttacctggacagtatccaggtggacaggtgccttatcttggctgggcatgagaggggtcccagaatgtctggaagtgctggatggcccaggttatggccacttggctatcaccatgggctggactctctaaggacaacgtggggcttcaggctgacatgctgggattggcaacaccccagactcttgctctaggtagggcctggggcaggactatgtgccctgagccctctatcctgggcaggaactgtgggtcagagcggagggcaggcagcttgtccttgggaccttgctggcttcctgcccccagggcctgtatctgcttggcctcccctccttagccaactccttgacccctcagaaacttgacctctctccaggcttttcctatggggcctacccaggccacacccctcccagccagtctggtgctgcctccaggacagagaatgggagctgagtggccctgtggtcacatgtgtgcgtgtgtgtgtgtgtgtgtgtgtgtgtgtgtactgggggtgtggcatgaggaggagcactggagagggagtctggggtgacggtgccgtagactcactatggtgggtctcagcccagtggctgaacatcagtgacaccgttgagagacacgtggacacttcaacatctgccctgctcttcaaagaagtgacctcacaggggcatagtccctgtcaccattctccaccccagagccctggccccccatctgtgctcaggaacaaggctgtgcttaggaacaaggctgtgtccacccttgaattgtccaagggtggaaattagaggcagccagaagccgaggctagcatgagccagcggcctttaatgggacactccatcttcccctggcgaccgcgtctcccaggaagcctcgggaagctgctgagtcaacactgcatgggcagggtggccggtgctcagcagcagcactgggcctggcctcccagtccagctgatcaccatcccgggggcacctgcagctcaggggcagcgtccctgggcttctcctcctccatggctgcaattccccttcctagaggggccgcagataggaagaccctcctgtacatcccagggacggtggatgttgctggtgtagggactgaatcgacaccacttctgggactcctgtcttctgcttggggctggggatcctggacccgctgcctgccgagcacagaggggcacagctgcctccccagccaactccctcgggggcttccaaagcagccatccagaaaatgcctggtcatagtcctctaggaatttctggagctgtcttccataccaccaacttccctggtgcggacgggaggggctgacctagcagtccatggtagggaagccccagcccattgtaaaccctcccagccccgccaggtgtgcacccccgccttgctcaaccttcatcagctgtggaggtcaagagcctcatcactccctcttagctctgctccttcctgcagggaggcacgcttgtctctggggcttctattcccataaaccgacccttcctttctcatgtgaatccactttaattacaaagctaaataacgagaaggaaatattaaaattaaaaaaaaattccctacacatagcaagtttgcttgtgccggccaccggctccgggagctgaagcccagagtgaggatggcaccacgccactcactaaaagcatgagtgtccctaaatcaataattcatttactttaatgagataagtactttgaaaactaattgcaaacctgctccatttactccaacctgctacagcccttaatgtaaatcgcagaaccatggctgtggggaggagaaagtctttaggtggaagacactgtgtcatcttcccctttcttctaagaaagggaaagaagttctgccaggtacggtggctcatgcctgtaatcccagcactttgggaggccgaggcaggtggatcacctgaggtcaggagtttgagaccagcctggccaagaaggagaaaacccatctccactaaaaattcaaaaattagccgggcatggtggcgcacgcacctgaaatcctatctactcgtggggggctgaggcaggagaatcgcttgaacctgggaggtggaggttgcagtgagccgagattgtgccactgcactccagcctgggcgacagagtgagacaccatctcaaaacaaacaaacaaacaaaacaaaacaaaaaaaaaacaaaaaaaagaaaaagaaaaggaaagaagttcgtgacgcgggtgggaggaatctggggaactggtggactcctgctgtctctccacctgccctaccgtgaggcagcagacgggtcccctccagtatgaggttcgactcacatccttcccctgggagagagggtagcactgggaagccggaatgtggcagcacacactacaatcaatgccgggaagtgactgtcctggggcctccggggactcctgtgagtccctctgccagcaggtgctctgagcagtccttccccaagccccgagccccgggaggtttgtgcggttccagagacaccagcacagggatgcatgttgttaggtgagttttcagttcatgctttggcaagtgaagtcccaaagggtccaatgttccaatagcttccccagaatacaaacccgagaccaaaaagatgctctgactagcaggtgccctgaggagtctgctgccaagatgctgagagcacagcctgtgctgagtggaggacagagcagcagaccaggaagctgctcacctaccaggggtttggccaaagggctgcagggcccatggggccaggaaaagacacctgagtccttctcactgttctttgctttttttttccccctctgagacagagtcttgctctgttacccaggatggagtgctgtggtgcagtctcagctcactgcagcctccacctcctgtgttcaagcgattctcccgcctcagcctcccgagtagctgggactacaggcacatggcaccacacctggctaatttttgtatttttagtagagacggggtttcaccatgttggtcaggctggtcttgaactcctgagctcaggcaatacactcgcctcagcctcccaaagtgctgggattacaggtgtgagccaccatgcctggtctgtcctttgcttttgttttgggaaaaaaaaataaaaaaataaaaagcaatgatggtacatttttcagcttctaatcttgtggggacgggggtctcaaatccttcttctctctccccctttatccccttctctccccactgtctctctttctggtttttggcctcactgggaatagatgccaatgcctacacagaagtccaagtttgcttcttgacattttcaggaagagcctgttttagagattatgactcttggaaaatgcagaagaacctatttctgctttgctgctagacactggttggtcctccgcggtgaatagctcagctaaaccaatccagctctcagggctgacccagtgcagggagcaccacactgacaggcagtcgcagcaccagacagcagcctccagtgatacgccgcagacacagagaaaggatctgaaacggattcccgcttaaatctcaaaccctactcaatactcctgtactgaggtgaaagcagaggataacatctccattcctcagaacccaccaggtgtgttgccgtggaccacagtcaaggttgctgctgttatgattcagcatttactgagcacgggaatgtgctgggccagcccttcccacgggggtccctgtctaaatggaacacaggttccccagcctggatggagccaggaccactaacgacactcaggggtcagatcctgggcagactaaaaggagctctagagcctcagggccaagggagggtgggacagggaacgtggcgaagttcttctcaggtgcacccagcaagagagatggacaggccctttggaagatcaggaggcaggggctggttggtggggggtgcactcacagctgctgaagaccctgttcaggaagggctcatctcctagtgggaatcccaccctcgccacaccatcctcctcctgctctgccgatgacagagagggtcctgcacctgggccaccttgtacttgacccggctatcacagtccacctgccatggctactcgatgccatgtcgaaaggcgccgtcccagcaagtctggccccaaagctgccctgctttctcagcgcttgctagagggaagcctgctctttctaagtggctgcagctgcttttgcagagtcgcttatcacttgcaatcccagctctaagtcattgctcaaaaccagaaatgtcaaaattctctttcccttataattctgcccttcaggctaaactgtctgtagggatgacgacagcagagcactggtgggtactgaatgctgtttttctatagacccacttttcttctccctgaaatactgacccaatacgcagctggtgtctggcccacctggcatctgtggactctgccccaggggctgtgctgtcctcgggtcgagggtggagcaggagtggggagtgggcacagcaccgatctcgggtagggtccacctgcaggacccgcagccctgtggcaagagggtgtgttctggggtccctgcccttccgtggtgagggcagctgcctgtaccccagaggcgaatgggaaggtgagggcaggggcaggaggcaccagagatggggtcatcgccagagaagagctctcctgtgttcctgagaagacaagctgcaaaccagctgcatctgggaggcaaggcctgaggagggaagggagcaggcaggactctgggggcccaggtgagatggcgttgcctgggaccgcatggaagggaaggccactcagctgatgcagaggcagctgggagggggctgagagcagggacctgctggtcagtagaccgggctccctttgctgagcctggcaatcctgcgttccccgggagccaggagacgcagggacaggctcggtgtggcctgggtgtctaggtgcccccgcatctcagggtcacagtagccgcaggggctctgcagcaggcgccattctcagtactgggcagcattttccctctctctctcctccctgaagaggcccgtctgagcattatccctcttttgcagatgaggaaactgatgctcagatatgtcaactgtgagtgcagcagggatgtgaatccagtcaggtgggctgggcagccagatgctgagccccttcctggccgctgactttccctgggtagagtgaggaccatgggagatggtcctcacacccctggtgtggggagccctctggacaggtagagtgctgtctgcacatcccttattgtctagccagcacttactgagcacccctgggcctggcccagcccatcggccacctggtttaatcatcaaataaggaggtacagggggaggtggaatgggagcctgccttgcccagaccctcacacccctccccactggctagctgtcggggaccccctgccctgctgaggctcagcttctcccagggccccttcccacaaagcagccccatgtgccggcacctgctccctgccacagtggatccagcactgtctgtggcctctgccccacacgttctgggccctgagtggaacccagatggggtcttgttctttcccctgcaccttggagctaggaaccctgagaagaaagaacgtggcctgagaagggccccagaaagagccacgaggtgcccacagtgcacgccaatagagcagagatgccactggcacctccacgggtgaggggtcagctgctggggccaggcccgtgcccctaactctgagggcagcactgatggccaaggccaaatccagagccccaggggtggcccagagaggtgtggccacactggcctgaggctgaggacacagccaagctgcagccagcttgcccggccttggggcctgatgggaatccgacgcccctcccctggggataggaacatggccaaggaagacgctgtaaagtgcgagaaaatggcatgtaggagaggattttcagtccacatcacagagcaactccaaagtcctttcccagctctgaggcccaccagctctggccgactgccagactctatcaccctccacgggccgcacactggcctcctcactggccctggcacctgccggcacactccacccagggcctttgcaccaactccagcctctcccctaccatccatgtgtttccctccctccctcccgtcctggggccggggcctctccccaccctagctgttcctcgcttgccttcgatctttgcccagatcctttttctcacctcagtaaagtcaaagccttcatacccctacacccctccagttcccaccccacggcgttcgctcctcgagccccctacaaacatactcatctgttcccccaactgcccatctcccctattgcaatgtaagcacaacaagagatttttatctgctttgtctcctgatgtacacactgatgtgtctccagagcccaggacagggcctggcacagagcaaacaataaatatgtgtgagtaaatgaaggagggggcacgagcaccccgaagccacatgcacagggtctctttctttttcctttcctttttctctcccaagacccaagacctgcttttctcttgcagaaagtggtgttctgaggggcatggagctccttggaaggagccggaggcagaggatgcaggtggaggcgctgtactgccacagtcccccaggagcctcccaggcctgtgcggctctctctccccggcacaggattccctggagggctctccacagtgcagagtcaatgatgcggcaggtctggggtggtgggggtgcatttctcacaaggtcccaggtgacacggaggctgctggagcaggggccaccgtctgagcagcagctcgcacacaggcgggtgggcggcaggaccctccctatcccatcccgcactggtcgccacggggaccttggtgtgaaaccaggatgaaggctgcacaccccacgcttcccctgttcacacaagaggcccccagagcggcttcccctcctgtttcttggcagcttctgatggaacccgaagaggggaggggaggacttcaggtgctcacggccggccccgcggaattgtgggtttgcctttactggggcttgtggaggggggaggcgtacgaacacctgcaatattaatgcagattgctgggcatcgggatccttcacacactccaaaactttgctttgagttcctctgagattccttttgaggtttgagattccttttgagattcttttgagttatttgagtaactttgagattccctttctctgcctgggctgtatgttaaaccaaaaccactgctctggaaaagcctctcgtggccacagctctgtacacacaatgtggctaagcggcggccaggccaagcccgagatgcggcggttctgagcctcagcttctccatggaggctcccacaagcccagagctctgcagccaggggcaagtcccgcagccatggggggccccggacaggggctgtgggtaggaaaggggtggccaggactggcctgggagccagccatgaccctgcgcaagcagatcccactgaggggacacggtccctctccttggtttccctgccaggacttgcacatttctctgtgaattccacctcggtcgttctcctttgaagaacaatcgatgggtagatctccactgatcacacagggacaaactgattaggatcctaaattagatcagtgctgctgtctgctcagagggcaggaccccttaatcctattccagtctcaagaggtggagggaggcccaggctggtgggaagggctgtgggccctctgtgcaggctcacggtgccagctgtggacaagcccacaggcaggagtggagctacggatctgtggctgccccgtgtgccccacaaggctggagtccatccttacttggggcatgaggacagccaggccaagactggtccaatagtatcagctgctccctgttggatggaaaccaacccatatgccttcagccatgagcactggggcagccccaatagggcgaggctccttcttgcttcttggctgcaaagcgccagctctggttgccttctccttgtttcaggtggcctggctgccaaagctgttggcagacacttgctgggctgatgaactctgcaggtgaggctgcagctggtaaggcctcagctgcctcccccgggagaacttgctcttggccactctgggttgaggcgacttagctgagcaggcccaggccttcagctcaggcagggtaactcgcccaggcctagcgtgcccctccagggtcccagggccccgcgaagccaccctgacccaagtggatgctggggtacccccccggctgtgctgcctcccccaacctttggagggctcaggctctggaaacactcaggctagagggagaacacagcaagggcaaacttttcgtgatttctgctctttcctctctcccggcccagcattgggaaggtggccagcacttttaaggaacaatccaagtgaacgctggtattttacaggcactttgtaaattctgcagcacttgaaatttatgtgatttgtttggaacgctggaaggcacgtggagtttctgcggacacagaggccttctgcccctggtcaggtttttaccagtcgtggcggggccctgggccctggctgggagagtcccgtgctgctcgtggcagaagtcctgggagtggccactggagaggaggcaggaaggcagaggctgccccagctcatcgtgagccacccccacctgctctctagggtggccaggtcatatccacctggaaggcagaccaaatgccaccacaccccctctgccccgagcccaggctccatgagagctaggactctgcgtgttgttgcctagaacggtgcctgacacacagggggcagccagcgaatggctggatgaacgcgcgcttacgaggggcagaacgatgtccccaagaaggtatgtccagtcctaacccccagagctggaatgtgaccttatttggaaaaggatctttgcagatatgactaaatgaaggatgataaaatgagatcatcctagatttagggttagccctaaatcgaatagcggttgcctttataagagaaaggagggaggcttgagacacacaaggaagaagggctcgtggaaccagaggcagagattggagagtcaaggaatgcctggagcccctagaagctggaaaggcaggaaggacccttccctagagctttggcgggagcgcagccctgttggcatctttttttttttttttaagacggagttttgctcttgttgcccaggctggagtgcagtggtgcgatttcagctcccggattcaagtgattctcatccctcggcctcccaagtagctgggattacaggcacctgccaccacacctggctaatttttgtatttttagtagagacaggatttcaccatgttgaccaggctggtctcgaactcctgacctcaggtgatccatgtgcgtcgccctcccaaagtgctgggattacaggtgtgagccaccaagcctggcttttttttttttaaagacgggggtctcactatgttatccaggctgtcctcgaactcctgggctcaagcgattctcctgcctcagcctcccaagttggtaggattacaggcagaagtcactgcacccggctcctgctgacatcttgattttagacttctgggctccagaacagtgagaatccatttctgttgtctcatgtcacccagttcgtggtcatctgtcacagcagccccaggagactcatccacgtgctctggtctggagtttaattctagcaagagcagattctcctcatagcttccccagttcacccacctgatgctgtttctgttttcctccctgggaccttagcaagcatgggcccggggtacagtctctgtgattggtgggtcctgtgtatactgccagaggcggtgtgccccacgaaccgggcctcgacttccccatgttctgtgccttctccttggctcctgcccccgctggaaggttctgctcccctgtacggttctgcagggcaagctgggtgagaacatggggaagtgtccggcattactgccacgaatgcccttggagaccctcagtgcgagaggagggggggggggcgcagatttgtggcgatcataaaaactgcatcaaactactacagaaagcagcccatgcagctctgttccaagcagactttccaccacctcccctgccagatgccacgctcggcagtgaccacagggtgagctgggcagaggcagtccagccccccgttccaaaggacaaaacgcagaacacaaacagttccaaagaacaaaaccctctcaccacccttcagcctggaggaatgctggaaatgaaaccaggtttcatgagcttgctcctaagtttttaaatgtaatgccgtgtcctccccgaagccggccctggggggccacaattattaactgtcttcaggcggtcatggggagcagctggcctccggggctcccacagcctcccgcttaacgagggtttcaccggcagcagctgacactgtcctctctcttgctttttcctttccctaatagtctctcatgaaggacctcatcaaaagctttttgaaaacacaggtaaattatgtccactgggctgccagaaggactgccactttattaactttttagagcactctggagagttagagagtctgatttccttttagatatgtgtagcagtttgaccttattacccctgggcacgcgggtctgtaatttccagggtctcccaggctgatgttagcgactttccaatttccagaaagggcttagtttccgaatgcctttcaagatcactgctattttatactttctaattccattaggtgaattctctcccattccggagatttagtgggctgggattttgcaggtaagcttataacctgcttcctgagagcctgcggctgggcaggcctgccaactctgggcaggtcgtgtctaccgccagctccaggtgactttggacaggtggctcagaactggcttggggagggggcccccacagagctcaggtcaagaaggctcatggcacagcatccagactgcttaggcagcaggaatttaaatttatacaaacactgtgtaaatccattcccgctgtaacagacctagaccagagctgacttttcccagagggctgctcacccggaccgggcaggtgagactgtctgctccagccttcccgcccctctcagccttctctgggcattgccctgccctccttcctttgattccaatgggaaaagaccctggttatagcagcctgttctcccatggcagaaacaaccttgaatgaagtgagcaagtttcctgtctggcctggcctccatccccagctgatgtgggagcctggacttcttggcacattccccttgaggacatttcagccccttgaagggaagtgtcctcatcctcgtggtccaggcaccttctcaccttgtttgcttcagcttctgatttacctgctgaagtcagtgctccgcccgcccatctcatccagctgtgctttctgtgttctgttgggactgttccttttcttagggggtattattcagaactgggttggaattgtttgctaagtttctgtgttctgtgatttgactttcaggagggctgttactgggccgggttcccaacgcggagctcccgaagtgcttggaatttcccgtgtgccaggacggtctttagaaagttatgagatgactcttggtggcccctagataagatagcttcagaatgggagctggccccagagacaccaactttgtgattagagggctgggacttcagactggctcaacctcaggagaggggagggggctggagatggagttcaatcaggtgtccagtaatgtcatcaatcattcctacataatgaaatcctgatggagaaagctctgggcccctaagtgtggtggagcttcctgcttggcgaacacgtgggtgtgcctggagagtgatggggtgagggcataggagctccgcgctcctgctcagacctcaccctccctggatcctttataacaaaactggaatcatttgcatgccactttcttgagttctgtgagatgttctagcaatgactgaacctgaggcggtcatgggaaccccagaatttgcagctggctggtcagaaggtgggtcctgaaactaggagctggcttggaagttagggtggtcttgtgggggactttgccctgcaccttggagtctgaggctgactctgagcagtgagtggcagaattgcactgaagcccacccacttggggtgggggcaagggggcatcacaccagatgcagaccttgctggctctgggccctgtgccatctctcagcctcggttggggagtcatactctttggcgggtcgctgaaactttagggccttcagtgcctccccttcaagctgatggtgatgggatggatgatctccaagttctgtccagtcctgaaatgctgtgaccccgagccaagatgcccatgtcactctctctcttttttttttgatttgagatagagccttgctctgttgcccaggctggagtacagtggcgcgatctcggcttactgcaacctccacctcctgggttcaagtgattctcctgcttcagcctcccaactaactgggattataggcgcatgccaccatgcccggctaatttttgtatttttagtacagacaggatttcaccatgttggccaagcttgtcttgaactcctgacctcagacgatccacctgcctcagtctcccaaagtgctgggattacaggtgtgagctaccaggcctggccccatgtcactctctatggaggaagatgccagagctcatggccttgttgtctgggaccttggctgacaccattcctctcagggagagacctcctgagtcatggagaagcccaggaagggtctaaggtgtggaaacctgggcgtgtcaactggcaaggtagaaggaggaggagctaggaacgcgcaaggcagagagaaaaggacgggaaggaggtgtctctccagcctaactcttgatggctctgggctctatccacacgatttctaaaatgccttccactttttatacccccactatagaattcaacctgcacatgtcaaaaatgtcctcggtctctgcaaattttccccttctccagggagttttcacctctttcaaccctccgcatcatccgttgtctctcccatctcctggaggcggagtagatgcgtttcctggctgccgtgaggggcaagcagggagagtggcttctcgtctgcgagtctgcgagggtgtcccctgtggggagcatctgctcaggactggcgggttgcagaccatctagccagaccctggccaccctcaggttgcctctgtaaccgtcccagtgtttcccagcccaccttgcctcacctcccatttcattccagaaactgcccctactcaaaagttctcccctgggcatgaccgacattgcctcttgatggcttccccatgggtctgagtaccacactcctgaccacagaggccaagctcagccccttcctccaagacagaccttctggcccttcctcagctggggtgctgctaactctcccgctgcgggtggggacgtctcttctgccctctgagctccagccacagttcccaggccagtcctctgccatcttcatgggaaaaggaagctgatcttctcctttgtgaccccaagcccctggcctgcacatcctcctggactcccttcccccaggaaaagccacactcatgccctggctgactccagcccccgtgtgatgacccatggctctggcatccctcccgctccctgacttcccacaccttcactccgctccccatctgtccctctccagtagcccccggacctcatcccaacctgtgctgcccgctgcctgccaccctctttcctctttctctcattcctgttccttcctcccacagaggacattggtcctgggcctaattaggacagctcagccattgctccctgaaacgtctccctctcacccccttgtcttcacacgcctccttgtccagcttagctgttgtactggggtgtccccccaaattcatgtctacctaaagcctcagaatgtgacctcatttggaaataggatctttgcagttagctaagatcaggtcagactggactggggtgggctttacatccaatcactggggtccttctgagaaggggagatgcggacacaaaagatagagacgtgcaggcacacgccaggaagaaggcatgggagggctgaggcagagattgcagtgatgctgtccccgccaagtaatgcccggggtcccaggagctggaagaggccaggatggatcctcccttagagccttcagagaaaatgcagccctgcccacaccctgacttcagagtcctggcctccagaactgggagaggaggcatttctgctgttgaagctgggtagtttattacggtggccccaggaaactcacacagacgccaggactcaaccatccaagaagtcacaggtcactgtccaggactcctcgcaggcagcaggtgctcaatgaatattggcccttcccactcctgcctctgagagctgtgggaaaaaattccccccttgaggatcactaccctataaacacaccttctctattgtcacctggccctctggatcctcctccccgtctccctggggatcgtcccatccacaccttctctgttctccccctacctgactttctgccggtgacctcccctcctgttccactgtcagctccctgcaccccccacctcttttctcctggcggggcctgggtctttcctctcccttgtctgtcactgtcctctctccagtgtcaacaccctgtctttccttgccattagcatttaaatgctgggttcctttccattgtaaacatcatcacaagcaagccttccagcaaggtgagccccaccactgccctcatccacctgcaaactctccagcaaagtgagccccgccattgcccttatccacctgcccacactgcccctccctgtgcctgccctgcagcatctggggtggggacgccactgctgccctcagggcctctgctgcttctccattcagcgagcatctgtctgccttcttggcttgacctctccccctctgcgaatcactcccttcctccttcttgccaccctctcgctggtcttccgcctctgtggccaccctcctggttctcctccgtcctccttccctttgccattggctcctcttcctcaaaaatgtcagtttccatggaggagcattccctgctccctttttcccaactcctctgccagggcccccgccatggttttgagaacagccctgtgctgatcacttccaaagagaagtgtgctgtccttgcctctctcctgagttcagaaccatctctgcaggtgtactgacctgtccactggggtccctcagatacccaaacctctaaggctgatctcagtacccttccctaaaagcctctcctcctgcactccccagctcaagagcgggcaccccctcccctgtgttgctcaagccaaacacctgtgacccatccaccatgcctccccttctcctgtacccaggtctgtcctttcctattatttaatatggccacctctcttctttccctttgccactgggcaggaacaagggccgccatttctcactgagaataatgcaatggtgccaggccaggacgcaccactaaaggcatccaagactggtccccctccaggtgcagcgcctgcaaagagagcgatgtaggcagagtaaggaggggaaagaggcagttctggcggccctgttcctcctccactgggcctagggggcaatgtggggaagccctcctgctttaatccacaaacacacagagggacaacaggctttgcccactggcatgaccatgacaataccttgcacagagcatgtactacacgccatcttcatccccattttgcagataaggaaatgaggccgagaggttcagtcattttccaatgttatgcaacaacatgctagggctggattcagattccttttctttttctttctctttcttttcttttttgtttttttcttctccaaagcccaggactgatgacttaattttcagggcccattgcaaaatgaaaatatgcatcttttcttaaaaattcataagatttttttttttttttgagacggagttttgctgttgtcacccaggctggagcgcaatggtgcgatctcggctcactgcaacctctgcctcccgggttcaagcgattctcctgcctcagcctcctgagtagctgggattacaggtgcccgtcaccatgccctgctaatttttgtatttttagtagagacagtgtttcaccatgatggccaggctggtctcgaattcctgacctcagatgatccatgtgtcttggcctcccaaagtgctgggattacaggcgtgagccaccgtgcccggcctaaaaattagtaagaatttgaaggtgggacagcagagcattaagccaggcatgggagtcttctaagcttgggtcggatccctgtgtgcctgccggactcaagctcattagccgctctttgcgctgtccttctccccgggcagggctttctcccaggatcaggtccctcccaaggcatgctggagccctctctctgagggcagaggatgcctgggccatgttcctaccaccaagtctttcttctgactttcccttctcccaccccatctcattccaactgaaagctctgaccctgcggctacttccctgggtgaccctgggcaaatcaccagacttctctggaccccgttgcctaattaaagacagtaaggacactggtcctaaagggtacagagccactgtagaaagtatcagatcccagagaagaagcggatcctactcccaggacaccatgaggagagtcaggacctagaggcacaggagttccccgggggctccccatggctccaaagggtctagtccagccagtgaccgcaagaacagaatccacaccagcagccggccacagagggccggccagttattcagcactgagctggcccttcccgcggaatatatgtcctcaaaatagcccgctgggtgggcctggttagggccatctcccttttcggggtgggaacgccgaggctgagagacgacggaaacttgtggagtcaggaaagggcgagggggagggtggttaacaccagctttggggtgtgtggggctccctgctggagagaaacagtccaggcttagagaccagaaatacacaggcagcagccgccgttgctattggcagccactggttacatggcctttgtggctgggggcggggggctctgctgatctcggggttaccttgaatgagaccctcacattctgtttgcaggaagacccaggcctcactgtctgactgtccctgtgacacatggctcatctgagtccaggcctgcatgcaggtggcaacacactggtgatattatcacttaaaatcacaagataacgggaataaccatcagcattttctctccagtggttgctgagacaagccattcccctcttctcagtgttacacaggctgccggccggcctggggagccacatggcccctgcccacgcggggccacgcaggtcccacctggctgcctccccaggtggccccttcgtttcctgaggagggggtagggggtctctcctgtcctcctatcagatcgctccaactgccccctttggggacttccctgttgttggtgaaattgtttaagttgggagttttgctcagttccagctctgtcatcgcagataattgtgtcacctggcacgtgttcctgtgtgagtcagtcctggggtgctgtggagggagggctctggatgcaggaagctggggcttgaatcctgccctcttcctctcctgtcccctttcccaacatctttctccagaaagattgtcttcccgatgtgccagctgtgcctgtctgcttgccccgtgtccccatctctagggccaccccagtaccaggagcctccgagggtggtgggccatggcagggaagccactaacctgctaggaatttgaaaaatgttcccacgtttcaaggggcgccatgctggggctctgcctcccaggggtagcactgactccctctggggcttggcttggagccaaagaacagagtggtgacctgtgactaccaggagtccctggcggaatctagccacctggtggacgggtggcactgccctgcctgtgccagcagatccagggtgttctctgagcccctgcagcaatctgagtcaacccttccacagccggcctgaagcccccaggagtgacgtccaccaccagggattgagggccacttgcactcttgtcattttttattggttgtggggacagggctgagaccaaagtctgtattcagagcaatctgcctgaaacctggtgtcacaggaattttccaggatacttcagtccagggctgtgagaaggggagagagtgttttagggtggggtggatggagtcaggttgttggaggaggtgtgcagaggccttcacatagtaggctgccctgtgcccagagtcccagtggtcccccagtgaaatcaccaagccaggcttagcttggcaggctatagggtaaacagtgctctggggggggcgggggcggggtgctagcagatggggctagtcctggggggcagcgtgaggctggccctggtcctggggcacataggtggtcccaagatgggcattggtaccacagagctcagccccattggcagtgatgtccgagcggggcaggtccaggatggctgtggccaggtgccaggagctggcttcagtgcaaaaacagttaaagtccgaggacagaaagagctgggctgcagggagcccgtgccctcctgccacagtgacaggcagtatttgcaggggggaaggaggaaccttctgccaagaagggacctgacctggtccagccagctggagctgacccaggtctccctgcctcctccgtttcctgcaggcacaactcttccagggttggcgattcagcacaggtgtgccccagattagtgtccagcgccaccctggccttgtggagagacggttaggtgtcagcagagctgctgagccagggcaggggcggacgctgaccccatgcatacagctggctgagagaaggcggtgtgccctggccggtcctcccaccagcagtgtccacctgtctgggcactggtaccacctgtctgggcactggtacccctcctacaattgttctcaagatgtgctcctgccttttggctggagactgggatgggggttggatatcaggatggcggagagtttcctgcccctgtaacctggcaggagcttcaggaccttgctgcctcagtttcctcatttgcaacacaaggaaatagtaccgcctcatcggatgtcatgaagatgaagtgagagaattgtaagattgctcggcaaagggcccagcacatggtaagtgctcagccaaaccaaggtgtcgcagctcttctctgcactcaggcgcgagggaactcctttgtcctgctgtgaggccgaggagttgaagcttccgtatctgggcggggaggctggtccgacctctgtcctcccacctgccctgggcagaggctgttcctggtcgtggggctcagggagccctgtggtgcagggctggctctgtggcacctggaaatgccaagtcagggcaccagcgagggtcccctcatcccccaagaggctgggggcacagacgtctccacctggctcactccccgctactggcccccagacttttccaccccaggaaatgtctcccctgcctgcagcttcagcgaaagcccaggaggcacgcttggctcctgcccatcctccctgaccacggtcccgccagcacaatccaaccagcaagcctctcagccctgcctccaaaaccaaccccaaatccccttctctctacgtcctgctagtgccccaatccaggtcattttcaccccctccccacactagggtctcacatggcccccgcaggcatccccaccccacccccgtcccacctccatcatccaccagccccagagctaggagccaaactggtcctgccttagactcttggctgtgctacccggccttcctgagccagcctgcctctacaccccttctctctgcctctctctccatgtctccctctctctctctctctctctctctctctgtctccctccctatctctctccccctcccctggcctcatgctcctcccctggcctcatgttcctccccttctcactaaaatttcctcccagattcttctgaccttcccagcttgttcctggctggggcctgcactccagctgtccctgtgtctggttttctctgtccctgatgtcaccgggtcattaggtctcagagaggcccctgaccaccaggcctgaagcacagcctgggcctcacacttgttctgttctctgctgagcactcacgtgatcatgatttcctgtttggggactaatggtccccccccaacctccaagacggtaggcttcatgagctcagggccacccacatccccaatacctggagggtgcagaccgcacgctcactgaagtccttgaagggaagtgaaggaatgggtgagggcccctccccaatggacacagaagcacagggggtatcaggcagggttgccagcacaccactgtgcctggctctctgccagatgcatcggccaccctcaaaggacttcagatctggttacggtagctcccccaccccatctcacccatactaacactgtgtggtcaagtggcacatggtgggctatggatggtcaggaagcaggaggccctcgggctgggcttggagctggaacaatcagaggtgacatttcctctaaatccagagccaccggaggacccaggtgttccatccgtggtatatacccaagagaaacgaaaatgtatgttcaaacaactagctgcacacgcgtattcattgcagcgtcattcaccacagccaaaaacgggaaacaacccgaatgtcatcaagtgatgaaatgatccacacactgcagtccatccacacaatggaattgtgctcggccataacaaggagggcatttctgacacatgctgcaccgtggatgaaccctgaagacggtacgctcagaggcagaagccacacaaaggccccgcgtggcatgattccattcacgtgacacgtctggagcagagccatccagggatggagagcagaggactgtcccccaagggctggccgaggcagaaatgagtgactctggtgggtcaaggttattctgggtgaggaaacattctagaccggattatggtgatggttgcccaactctgaatacactaaaaacccctgaattgtacaccctaaaggagtgaatggcttgtgaattgttatctcaataaagctgcttttttaaaaaaataatgtttcttgaccaggcgcggtggttcacgcctataatcccagcactttgggaggctgaggcgggcggatcacctgaggtcaggagttcgagaccagcctgtgcaacatggtgaaaccccatctctactaaaaatacaaaatcagctgggtctggtggtgggcgcctgtaatcccagctgctcgggaggctgacgcaggagaatcgcttgaacccaggagtgagaggttgcagtgagcccagcttgtgccactgcactccagcctgggtgacagagcgagactctgccttaaaaaaacaaaaccaaaacacaaacaaacaacaaaaaccaaaaccaaaaatcaagaaactggagtgtttcttcagctgctgcaccggccaggcatgttctcagcagtccacgtgcattgattcagccaatatacaacagctctctgagggagaagagaccactgcccctcttgtacagaaggggaatctgaggcagggagagtttacttgcctaaggactcagggctggtacaggctggagcagggtttacagccagctccctgtggctctaggacctgcacagtcagccaccccatctgctatggctcccagtgagcacatgatgacgtcagcctcggccttctccaaactccaaggtggtggtgccagctccacttttgcctggaaggtcggtgggtgacactgggcacattgagccttgtgttccaccagggaccagagtaagcccagcccacttctctgccccttcctggtgcagcccaccttgcccccaggctgccactgggttcaggctctgtacacatggcacagcctggttctgccccacctgcctggctctgcccagatctttcaaagctccaaggcctccaaggcctccaaggattccaatggtggggagggggggggtagtgctgctcgactggtaccttatactgtaaatacagatataagtattacaattgagtttaatatttaatacaatcaggttaatacacattccaaactccataaataatcattagctgaggttctaattgtgctggtgggatccaacttcatgactaatttaaagaccagaagatattcccatactcagttccccgaaacaccataaattaacccgcagcccaatctctgctgttacagccgacgcggtatgtttgccaaggatggcctggccactgcgggcctctgcccaaacctccccaggctcactgcctggacaggcaggggtagcatgtggcgtgctgggccttgaaaactccactgggtcaagggtcaagtcactgttgcgggtggaggcttggaaggagggttggctgtagtgtgggggctcatggtgggaagccagctgcttgcaaggggaagcagaggatggggcaagccagaaggctcggagacagcgtgtgcaaacacagagcctgggcacatccccttagccccctgcagtcctgcaccttgggcaggggactcacggggatgggaggttgtctctgcagagttctggagagggacttcagagttgccaccgaagcaaaatcccaagagctttacaggcaggagggcaggggcagttttctcagcctgattggagacttctgtgtgatatgaggaaaaagcctggaaagtgtggctcactctgcaaatgtacacaaaatgccaacatttcagaggtgtgtggtgacaacaaggggccacatctggaattgagatggccccaggaaggctgggaggctggcccgtggcagccatggggggcctcgggggtccagtcctgggagaggcagcaccagaactccacagccctgctccccaggcctgacgggctccctggcccgtggctccaggctgcctgcagtaacagcatcataggatcacgagaaagagggcctctgcccccctcctcagaatagctgaggaccctggttcctggtaccccagaagagggaccccgatgccaagctcttggtgtcaccctgcctgatggggtggttcaggcgcctgccacatggcacctgctcccagagtgggggaggttgaagccagaactttgctggccctgcctcttggtgggtgccccctgcccagctgcctcccactgggaagtggcccttgcagtgaggtggggaaccagggagcatgcagaccccccaccctgcctgtgtgctgtgggcgtggcctgtggtgccggccgggcctgtgcccagtcttggcctggagatctgccctgccagcggcagcccgcacggcttgtgtctctgtctggtgtccaggtgcagcctcacacgaaaggcacccctgacttaagcctctaccctgtccaggacgaagatgcatccacatgcatagggcagtggcccatcgtcagcttagtggaatagccagggcacatgatgccagaacgggaagggacttagtgatctcctggcccagcccctccagtgacagatgaggaaatgcaagccgtgggaggagaggcaggggagtggtgccagcagccggttctggttgagcacttttgtggggccagctgcctctgcctctgtcatcccacttacatctccacatgctcctctcacaacttttggaggcacatattagtaatgcgcccattttacagatgaagaaattgagggtcagagagcttcagtcctccaattactagtggcagagctgggactaaaattctggcttagaaccacaccgtgataggaggaggaggagaggagagggcaggggaggggtggcaacagggtaaggtgggcacgggaggtgttcacggggtcttaagaacagccaggagaaaaagatacagaattggattagcaggaggtgtctctgcttctctaggttggacattttggggacatgggtcctggcacacagtaggcactcgatatttatactgacagggtcccacagcacccaggacattccctcctccagtgcttacattctgggacctctaatggtccagttcactcttgttatttttctagaccttgatgctgagattccagtgggtggagggagcatcccccaccaccctcacggcacagcatggcccggcccggcacggtacggcactgtcacggcgggttgtgggcacgtggcagatgctgggtgaccaaatagagcgaaggcatgacccagtccaaataacctatgtgccagccagttgtttctggtcaccctgtcctgtccagctagcactgctagcatttgctcagtaaacgcaaactcactgcaggcaggcctcagctccccacagccagcaaggcactcccacggcagacagctctgccctgcaggctcgtggttgcagatgtaaacttcactccttgggagctgtgggctccgctgtccaccccaggcagggggaggtcacattctcaggaaaggggatgcaggttagtgtttgtcactgagaggttggaaaaaaaggacccgtgttgtctagggaggaacaactggaaggtcttaacaactccaggcaccagagaggtgaggcacagtccaagaggcaccgcgtgtctgtgtgtgtgcctggtgtgtgtgtgtgcttctcagaacaattctaaaatagtaatgggtagtccagaggaaaaaaatcatgtcaccattaagaatgtcaccacacccctatgggaagagcgaagcagcagctagggttgtagacagaaggcacagcatgcacatgtgtatgcacacacacacgcacatacatgtcacacacatgtgcgtgcacacacacacgcacacaccactcacacacacatgcacacttatacacaccacacactcacaaacatgcacacacacgcacacatgcacacacacacacatgcacacaccctccacacacatgcatatacgcacatgcacacaccacacatacaccccccaacacacccaccctctgaggaaaccatcaatgcgacaaaaagaaaacacgtgagtcctatgggactgtctgtgtgagatggagaagacacacagagggtctgggcacaggacacacacacgctggaatgtgaggcccacccatcaaggccgcgatgccttcctgcgaggcctcccacaccggagctcaagctctgtggagctccaagttccatggaggggcctcacccctgccttgagcaactgggaatgtcttcggagtgagctcaggttcccataacgcctttgaggagaacacgctgattcaggagggtgttccttttagagagtgaatttagacgaaagtcattatgttttggtcacagtcatgtagacgggccttggggcgcacggcaggcggggctggcatcctcctatcaaagctgagcacaatgaaccgaagcatccagatttgcctctgctttgccaggggcctctgcctgcacatcatcctgagaccaggaaagagctgccaggcaggctgtcccattgtggggggggggaggggagggtctcctgcaggcatgtggggcacagctctgccatccatcacgtattacttagaacattctgggaagaacctcccatcaatcaggagtgtaggagaagaggcagtgaagcgagcacgtgggtgaggacaggggatactgaaagatgatcccctatcacctccagaccacatctatcacccccactggcaggtggcagtgacagatttcacaagtgcttctgagccagacatacctgggttccagccttggcacggaccagctatgtgaccttgggagcttcgcgtgtcttccaacctgagctgctttatttgtaaaatgggaacagccttgtggagttgagggaaggatttggataatgatgggactacccaggtgccttgggcctggaggagccgtgggcttgtggtttagcttggatgcgtgtggttagcttagagaggactatccaaatgccttggggctggaaggagccgcgggcttgtgggttagtttggatatatggggttagcttagagaagactatccaggtgccttgggcctggaggagccgcaggcttgtggtttagcttggatgcatgtggttagcttagagaggactatccagacgccttggggctggaaggagccacgggcttgtgggttagtttggatgtatggggttagcttagagaagactatctaggtgccttgggtctggaggagctgcaggcttgtggggtgagcttgggttggctcaggttggctctcctgccctttggatattttatcagcactcacatctctgcaccgctagcccattctgctcagtgatcaaataaactggtggacctggctggaattcacacccaatggtgtatgcatttaactgccttcctcaagggcttttcacacatcaaaaggtgttaaaatcaataagtagccttgaggttttttcttctttgaaagtaaatatatgcatgatcttgcacttggtcaagctcacccgtcctggcattgggtgcttaggagtcccagtgaaggaagccatcatcggggaaacgaacaagccattaggctgcagaaagacgtcagaacaggtgcagcccgttaatttcatcatcactgagcgggtccgtggactttgctgagacaaatatatctggaaagaaaacactgagggggcaggggatgggaggagactgacatgaattcagaggttgttggctggggttgcagttttatttgctttttgaaatagtgctgaccaaaggccctgaagcttattaagaatccaggcagttctggaggggggcttggcagcaccacgggatgggcatggggagctatgggtggggaggtggtggaaggagactttcccacaaacgaatccatgagaaggttgattgagaacacggccacgaaagcaggggtaacggaaggggtgcaaggagaagagggaacctcgccctgttggctgaataaagtacaggaaaacttccatgtcaaaatgtttttcccctaagggattcgctgatgcatttcctttttagaaaagggttcttttctgctctcgggagcttaatttcattcggaatgaaaaatgacgagagtgaattggaccagcagcttgtacccagcctgaactgctggctcaatgcgcttcatgtttatttagctggaagcctggttgggaagtcattaccttcaccaatgcaaagagaataggggtgtggggtgggcagggagggtcactgcacggggatgtggctgcagggccggccgctgacccagaaggggtcctggaggagcccataagaggcactgtgcaggggaagccacctctgccacgcatccgcctggaccccaggcagctgtgttctctgggcatcgggggcctcagcccacctcttccaaacccagcacaaccaacacaacatcagtccaaagtgtgagggcagccgcaggctgggccagttcctggcctgatggaggctggagaaagaggctggtctactggacacccacaaaacaagactgaccctcagctctgcctggtacctgcaaagcagcagcatctttgaagtggttcaggtttgagccacccagccagtggttctcactgtattttagctcatgtgaggaacagaaccaaattgaaaaggggaagccaccagcatcacaggcacacaatctgagtgattttgttttcaaggcaggcctggaaagttttcattttcaggaaagaaatcaaggcgggggcgggaagaaaacgcttgctaaagccatcgatattttgtcatatggaacaggagcagcctccgttagtaggttttgcttccttcgtggtttcgtgttcatagcttctagaataaatgagggagacagaagtctgcctgtgctaaggtaatattcctatgttccttttcttttttttttttttttttttgagatgggagtcttgctctgtcgcccaggctggagtgcactagcgtgatctcggctcactgcaacctctgcctcctgggttcaagcaattctcctgcctcagcctcttgagtagctgggactataggcatgtgccaccatgcccagctaatttttgtatttttagtagagatgaggtttcaccatgttggccaggctggtctcgaactcctgacctcaagtgatctgcccgcctcggcctcccaaagtgctgggattacaggcgtgagctatcgcatgtgaattcggtctagatttaaaagtacacggaatcatggtgagatttgttgtgtgtgcttgtgacaggtccttagagacctggtgggaggatgcctgggcagcccaggacctgccttttctagaccctcttgttggcaacactcctcccgatgtcagacccgagtccttgcccatcatgcagagcggttagtggctgtggcagctccagccatcctgtttctttgtgctttgttggatccatcgcctagaactctatgactgcttcaaaaccaactaatttccctttgtttgagacatcgtatcatttgcctgtttcagtacttataaatggagatgccttctccaggaccatcgtaacatttgcctgtttcagtacttataaatggagatgccttctccaggaccatcgtaacatttgcctgtttcagtacttataaatggagatgccttctccaggaccattgtaacatttgcctgtttcagtacttataaatggagatgccttctccaggaccatcgtatcatttgcctgtttcagtacttataaatggagatgccttctccaggaccatcgtatcatttgcctgtttcagtacttataaatggagatgccttctacaggacagttgattctcatctgggccatgtttccgtgagcatcggcacgagtggacagtccgtttccaatgcagggttgctgaagagaattatttatgaagtctctgaaccacttggggttcagaaaatattttgggaagagtaaaacctaggttacaatatttaataactttcttcaatgttttgttattccaaatccacaacccaaatgttttggtttgttcagaaaataacagcaacaagaaagtcataaaaaatagggaggagagtgcgtggtgattgagacaggccctcatgggagctgaaggctcagagcagtcacaaggagatggctggaagcaggcttgggggaagagactcgctttttttttttgacatggagttttgctctgtcacccagcaggctagagtgtagtggcttgatctcgacttactgcaacctctgcctctggggttcaagggattctccggcctcagcctcctgagtagctgggattacaggtgctcatcaccacgtccgggtaatttttgtagttttagtagagacgagatttcactatgttgtccaggctggtgtcgaactcctgacctcaggtgatccacccacctcggcctcccaaagtgctgggattacaggggtgagccactgtgcccagccagccttctcttttatgactgccctgatggactttggggtcatgaaggggctggagatggcaagcttggggcccttcatcctctggccctggtgttcggagagaagaagggcagacacagaagtagacctcgctttgtaaatggtcatggattcaaaagcttgtgtggatatttgcagcctgtgtgacacctggcaaatgattccactccctgtgcctcagttttccatccacaaaatgggagtggtgctacctgccttgcggatgtgttggaggatgagaaagaagatgcttgaaaatctccttctacgacgcaggcacatcgcaaagaacagccaaccctcctctgggctgtaaccctctcctcgctcctgcactgagaagctgtcagtggcgctgtcccccctttctgccccagccaggtggatagacaagctgcagttaatatgcccacaagaattcccatttgctctttcctgatttcatgccatggtcagctaatgaaacagacctgttgatgaaaagttccatgtggatgcaaatggtactagttcataaccatatattcctgctcatttacgtgatacacccagagatgttgtaccttcatttctgaccatcttcaattaacacaggctccacatactgtagcatacaatgccctgaaacctttccatcaagtaggtaaagatctgtaaaccaatattgaaatgcactagagaagctccatcctacaggaatcctgctgtgagtccctgtggtttcccgaagatccactgacagtgccagaaaccacctgctcctttatctgctttgataaggctgcattttcatgcattggtttttgttttgttttgtttttttgagatggagtctcgctctgtcaccctggctggagtgcaatggtgcgatctcagctcattgcaacctccgcctcctgagttcaagtgattctcctgcctcagcctcccaagtgtctgggattacaggcgcccaccatcatgcccaggtaattttgtatttttaatagagatggggttttgccatgttgagcaggctggtcttgaactcctgacctcagatgatccacctacctcggcctcccaaagtgctgggattacaggcgtgagccactgcacccggcctgtgcattgggttttgttcaagtgggtacatctgtcctacacagaaagtcaatgggcagaatggctgctggcttgagaccattccactcagatcagctggcactgtgaccttctagaagctgagtactggtgcagagtctattgcaaataaatgtccctggcctgcctctccgagcccttgtgaggaccctctgacgtcatgtggctgccttgattggcattgcagagattgcttggctcccatgtcatagtggccacctggaactttctaggactttctgccccttagagagcctggtaattcctggcttctcactgcaggttttggactcagtggagtgaggccactttctccacgcccccggctgccatctgcagttctgccccagaagtatagagatgactctcctgtccccatcccctcctccatcaccaaatcaccccagcacttctctccccctgcagcctgctcccaaagaccagcaaagcctgttgaacagaaaacgctgagatgggggtgcttcacgcccggcccctgatgcttattaactgtgcagggagggtttgcccatccctgggctggcttcctcctgatatgtgacagagcttaatacgctgcggctcccagcctcgccagccaccccgagagagctgcatttcacaagccttttgttaaccccctactgggctgattccgtgactttctggttcttctcccttggtgttaagaatgggaaagggtagggccctaaagaggatggagccaggctgtgcgttaacatagaagctggagagggaggtcccacccatagacctgctcactgagggaagacggaggtgcccagcaaggaggtgcctgctgaggacgccctggtgccctcctcagacactgtcagaagcctggtcccacactgtgggctgagaacgctgtagggtcagggttccctaatccaccctatgtgcgtgtcaagtgaggtcctgtggccagagactctgagaaagcagcatgaagccaggcacagttcactagcggtgcttcccccacatcacagcggccctgacgcagctcgaggggctcacaccggggcaagcaggatagctttacccagaggacaacttgctgttggcagaccagtgacagagccttttgtggagcaaagggtgctctttttaaggggacaatcgcttcttcaccctggtgctctgagtgtgtttgagaccctctgctcgctaaggcgaaggaccccctgccttactgctcccaggtgcgagaagggctgacaagtgtcactcccacttggaaagcaccaatcttccctgacccccatagcactccccacccacagggggccctgggtgcagcatgtctgtgcaaagagggagggaaattgggtttcaatggattcgtttttcctcttgagtaggtttgcattgagtggggggtagagtggggtgttgatccgaggggttgtcacatacgccttgaccttccagctcagtgtctccccttgctgctgtccaggagctccatgacatgctcagcaaaatccacaacgtgagattctccaaccagtgctctgggcaggatcagacccactgatgtgagaccggccaacaggcagctgggccaggccagggcaccagggcccctccccaccctgagaatcggggatcctgaggtgacctgtgccctgtgccggcactgatgaggttggcagggaagcttaaagaaagaagggctcagccatggctggagggacagagcccacaggggtccaggcaggttgggctccccggtctcagaagcttcctggacaccttggcctgtgctgaccgcctggcctccctgcttctggaatggacgggctcatgggacgtgtgctctgacctgcccactgtttctcaggattgtcacattgcggcacgtcgcagacagtgagtgcggctgtgcatgggacgcgctctgccagttaagtcgggccattccgggcgctgctgcaacccctctcgggctccacatttcactcccacacacaaagtcttaagtccccacgaggccctgcctgctctgccccagaaccctccagattccacctctgagtctcaaatgccaaaatgccaccttctcagtgaagcctctgatctcctccttcccttctctgcaccccgggcctcagccctgctcccacctgatatgcgacaaatcataccacttgctggctgcccgtcccctctcggggccagggaagctcaccaggacagggcttctttggaagtctgttttgagaaaggtgatccctgcccccagataccacaggccaccagggaggacggacgggcacacaaatacttgccatcagagagcggagatagatcccatctgtctgctcaaagaaagtcctcccatgactggaggagtctcctggccttcttctgcaggctggacttcctggtagtggggcccgataaccactgcccctttccattctctgcagccccccccagcccggcttccagcccctccatcctggtcagtctgtgggcatgagactcccccactgcaaaacgtgatgggcagtttccgtccttaccacgtctctccccacctcctgcatgatccctcgcccgtcatcccagaggctctgccctcagcttcagtggcccacactccagcgaaatcccagggcctctttcccctgggcctagcttcagttcactggtcttctcaccccacagcgacatgctctcctgggatgatcttatccatctccacgtttcatgtcccccaaaatataatgacccccccaattgatatagctgaccccaataacctctctgatttcagagttcatcagtgaggtaatagggagaagtagagtgttctaggcagaaggaacactgcatgaaaagcacaagttctgaaagggaaggacctggctcctgttggggacagagttgtttagcatggatggaatacagtagcagggaatgagggggtgagccccagggactggggtgggaatcttgcatccatggggacagctggggggagtcactcacagctgtcctcctgtcattatcacatttggaaagtgacctcaccagaacctgtcatctctaaccttctgctgctccccagatcccaaaagacacgcccctatgcagagccagggacaccaggcctctccaatacgttccgcacagcctctgcccacgtcgtagtctcaggcccgagtcggcgggttaggtgtggcaagagccatctggagccctgtggctggcccaagcttcagtcccttcaagccagagagatggggaaggttagagtattctccaaaactcaggcctgtttctgccccggcccttagtgtcgacacccaggaccagctttgtagaccagtgagcactgggacccggcagcctcgccagccatcagcagccacagaaggaacccagtacccagtccccatcaagcccttgactggcctttgcccctgacttcagagctgaggtccccagaaattatctgtcttttctgtttaagccacagcttcccctgacttcttccttttgtgttggtgacagcccagggactgtgctttttccagacacgatgttaactctctggtcctacttcctggctcaggggacagccctttggggctttccccctttggcatcatctttaaagctgcttcctgcactcaaagctgcctcccagctcctggcctctggtttagagcttcccccagaaagtggcgtattttatctttatgtgtcaggatttatataaaaaggggatagttcaactctaaatgtaatgagttggaagaacagctctctggtggctttctgtagtgaacatgacatcaataacattgattgctaaaaataactaataacactgggctataactaataacactgggtggccagggactgctccaaccctacccctaaaatggatgaaagggaaacaggcccttgcctccaaacagacacacctccaacaggtgagttcccagagggttcagacagaaggtggaggagaagcaagatgcccagggggtctgaaggggtgagcagaagtttttcaggcactggaagctccttggagggcaggcaggtggtgggagacaagcacatgctgtaggggggtcctcacataccagtgtgagacacacatgtctggaaggggaaccttctcaagctggaggaggcatcatagagccttgtgaaggaggcctcttgggaggcccatgaagatggcaaaggaaaagggaaggaaggaatgagaggcaggatggctcgtggctaggaatgcaggctctggggtgagccagctgggttggagtccttgctagctgtgtgggcccgggtaagccatcgagcctctaagggcctcattttccccatctggaaagtagagattcgtgattttccatatgctgtgacggtgtcatgggcttcccatgaggacccgaaagcacagcctatgtgtggctcttcgcctcatgcctggtgcctgggaagtggttcaacacatgcctgccgttgccacgtcccttctcggtatagccaagggaagggctctgagagctagcagttagcaaatggagtctgaggttgacccacgtgacccttgctaagggccttctgaggtcaggcccgagggaaataaatgatatttaggatgaatgtttaccaaaatcagagaagcaatcatttctgacaaggcagacggacaggcatagttacatacatctcatcgagcctccagaggcttctcctctgggtttgctgactggtggctggagaggctctaccttacacacaaaatcaattcttccatgccctcagccctggccactctgcccttgacaccctggctgcgttctcccagaaatagctgtgtgcttggattggaatctgctggggcgaggggcagctgcagcaggcagctcagctcagctcagcctgcgtggctctctgcctttctggaaggattagcttgcctaacctctcccagtgcttcccacccctctcctgggactttgggagaggaaaggcaaatgaaaggtgtggtgttgggggctggaggaaagaaagaccatgataaaatgccagcctgcagttgaggaagaaagttatttagtgggtcaaaaatgagtcaaagtttatagagaagaaatgacatgttttaaaattaatagcataaatgtcaactctgatggccagggcattaaaccataggatcaatggagcattctttgtgaggttattttctctctcagatgtgccctgggtgtggggaaaagagcgagagctcgctctgcggtgccacattttggattctggggtagctccatcagctaggttacagtgtgagagataagaaagttgctatgaggctgtgttcagttggctggtctgcatggagctgacattaaatacagtaggaatctgcagccctcggcttcaagtgtggggatttattgaagtcttgcaaaagctcttggtcagggatgctcctcccctgggcaggaagaatggggctgagggcacactcagaaccctgtgtcatgcatccaccccttgagcctcacagtcccttattgcatcagtaacagggtctgcagagccggaatggctcactgcccagggaggcaggaccaaacagggagttttctctgaagtctgccttgatctctgttctcagggacaggcagcagtgtggaagagcccctgcgttcacagaacacagagagtacacagcccctctcccctggcaactcttggagcctttctagatgacctcatgtggttcccctctgttcaggagcaagcaagggaactacctttgcaggttggctatgagaaactagggcgccacatgatttagctaattccaacacaaaagcttcaccacggagctgaaccttgaatttcacaacgcccaagtctcaatcctgggttggaggcatgggtttaactacagccagcctccacccctacttagatgctgtagcttaggacccccaaagccagccacggagctctctcaccaatttaccccacccctcattccagggctttctctggtgatcagtattttggggttgctctgaattactatgaatcttccagtaatcatattgtggtaatagaggggttgcctgaaaaccacaggaagccaggagatgcctggtgccaggacacttcacaggacctgaagaacagcttcaggtgaggactaagagcaaaaccagggtaaggaagggcagagaaaatcccactcgtgtgcatcttcacagaccccacgagtgtcaggaccccgcatgcctccagtatagaatttattctattgtgccttccttgtctccccactaaccaagagcaaccaggggaccagtgctgtctccccactaaccaagagcaaccaggggacaaggggactgtggcaccagtcactagcatgtccccggcacatggaaggttctcaatgaatactggttgaaaaaaggaattaaaatgttagtctataatggaacatgtttacactcacacttacagttggcactgtacacacacacacacacatgcacacacacacacacgcacacacacacacacatacatgcagacccagtgcactgcccttagaagtgtttgatgctgcgaaggacagcatgggctgctttcgctgtgtaatgagggaacagcagtatgccaaatgcttagaagagatccttttgctttctttcctccgctcaattctgccgctagagaccctactgttgtattctgatttcaccaacatgaaactgcatttgggggaaaaaatcacccattccctttatattaggaaagtaagaagcaaacagacttcgttttggaatttggcctttgttttgggagttggtataaaagacaattcctccctggaggttttgctttggttttatggggtttttatacctgcccccaccttccatcccccttgaaaagaggcccctgaagagtttgcttggctggaacatcacagaccaaagtctgagaactgcttctattttacagtgccactgttagtaatgcctcatatgtatattatatttcatagtttttcaaagccacttaaaagtatggcctcatttgacccttccatcagacctagatggtcaacagagcacatctcattatctccgtttaacaggtaagaaaactgagaatttagagggtaaagtgacctgctcaagcccacatggggccaacaaaaatgttccaagttactcatctgctgctcacatcaagaccgatctttgcttccttccttccttctttccttccctgcctccctcccttccttccctgcctccctcccctccccctccctcccctccctttcctttcccttccctcccctccaccccttccttccttccttccttccttccttccttccttccttccttccttccttccttcccttccttcctgtctcactctgtctcccaggctggagtgcagtggcacaatcttggctcattgcaacctccaccttctgggttcaagtgattctcctgcctcagcctcctgagtagctgggattacagacttgcaccaccatgcctggctaatttttgtatttttagtagagacggggtttcaccatgttggctgggctggtctcgaactcctggcctcaggtgatctgcctgccttggcctcccaaagtgctgggattacaggcatgagccacttgcccagcctgagccattcttgctttagataacctgctgctttgggggctgacagataagcaggaaggctgccctgtagcagcggcaaggtccacaaataagccagatgaaggagaagagaaatatagggaggctgtcagggactcattctggttaggatttaagccccagctgctattacaggatggagagatgaaacagggccgagaaagagcctcggccagcatggggtcaactagggcaggggaagcaatgacatagtctcacagagtcacctgtccgacttccagagcaggtacagattcatacagagcaggtgcagattcatactgcagcctactatgctcttcaactggggccacctgcttgccttacagagtcagaaaagcaaagtgaaccagttttctattcctctccaacaagccgctgctcttccctaacagtttatctgcacttaagatccctcagcagaatcctggactggagagcaagttcgtcagattagatggggcatacctttcacccagttctagccttgagtgtctgtgccggactccggtagcagacaccttttgctttttttttgtggatggagtctcactttgtctcccaggatggagtacagtggtgtgatctctgctcactgcaacctccatcttccgggctcaagtcattctcttgcctcagcctcccgagtagctgggacttcaggcgcctgccaccacgcccagctaattttttgtattttcagtagagatagggtttcaccattttggccagactggtctcgaactcctgacctcaaatgacctgcctgccgcgactgggattataagcgtgagccaccacgccccgctagatacctttgcttcttggagaaacaggaaagatgcggaatgggggaaggcaggagttcagcaccacggacagcgacctgcgggtgggagacgctgccagccacgcggccgaactccggactgggggccacgtggaggaggccttggttcagctctgccccatgcctcacgggacacacatttatcacctggaaacagcggccagtgctcaggaaggctcatgccattgcggatctgccttcattaaatccaaagcatgattgcttgtcacttgctttaattcgtttccctcccaactctttatttgaagagctttctaaagttttgtccataagaggaagagattctcttttgggggtgggtgagaccttgttatggaagagaacagcggccagttcagggagtgtggtcttccacttcgatcgtgatgtgtttctgtgtcgcttgaagtctagcttgcctttcctaacgctctcggcccgggtcagagactccatgtgagagaagacggccacagggaatgtgcttggatttgggaatcttctcagaggccacggtttgacctggcaccagtggttggggcccataagccacgcagcacgcagatgaaatccgcctcgtgtgtcctcactaaatccacagcgctagaaatgcatttaaaggcaatcctgcctgcccacagcagattttccataccctggcaattggagcatgttaaggatgagacacagctgccaggtctgatttcttaaatcaagattcgttttgtagggagagcaggaggaaaaaattaatgcacaacctggcaaggtgagggagcgagggagggatgcctgccgccttggtggctctgtccactttgggtgggagccagttcctttccagcaagcgccttccagctcagggaagggcaggggcttcccacagacagcctgggatgagcaatgcctgactcagggtctgagtgcgggcaaagtcaggtgctgatggaaagatcagaagttgttggcttacattttgtttgatttgtttttctctgagttttcagccattctcaccacatcacacttggtttcctgtcctgccccaccgtcagctccccctgctcccccagcaccctgtgtccatcccacaaggatggatgagccaagctgctcaggcacagcttgagggtgggatctagtaccttcccttccctggctgcaaagcatggggtgcgtttgaggaagggtgagggcagcattgggagtggggactgtgcagtatgtttcggtctgtctgtggcagggcatggggaagggcggttatttgtaaataatacttaattgatgagacttaaataatagatgagccagcgtcattcccagtggcccagcagtactgatggccaccttcattcttccatttcccaattacaacagggtggggctgggcttgggggaggggtgtcaagaaggggatagaagagggcaggggagcaacggggtgaattagagacttttgttgcatttaatatcaattcattttgcaggctgctgacacagccaaatttcacagctctgaatttgtggggctccccagtgtacagacgcaaaaggaaaatacaaaagaactttttaaaaaatggcctgccatcagcaaaaaattaaaagaaaattttaacccccaccccgcaaaaaggcacaaacagacacacacacacacaccacacacacacacacacacacacaaaatctgattttgatttcttatatggttgagggactcatctcattacttaataatcacattgtttgccagagccgggctgtgttttgtcgctctatgggccgactttgttacacctgcatataaaaatgacaagtgtagtgagattgtcagcaaaagggacacactgaagaacaggcacagtcccctgactggaggagggtagccccagtctaacccctccccggggagccgggctcccaggaaaatgcccaacggaagagtccatacctggcctccagcctgggaggtttgcttcctccacacacaccagctgtagactctcccatctccctcctcttcctcctcccctccctcctccccttcctcctcttccttttttcctctttctcctcctcctgtcttctcctcttcttgtcctttctccttcttttactactcctctctgtctttctcctcctctccctcctcttttcctcctccccacttctcctccccttcttcctcccccctcctccccctcctcctgcttctcctccctttccttctcctcctctccctcttctcctctttttcctcctccccatcccctctctctcctccccctctccctcctcctcctcttcctcatcctctcctcctccctctcctcttcctcctccccatcccctcttctttctcctcctgcccctcctctccccagcagctctggctttttcctcctgatcttggccagtgtcttgctctgtgtgcgttcattttcttaaagtgatgcccaaggcccactacctgccttgtctggagcttggcagagcctcctcttctccgagcagccatgagttggggactggggtcacataaaagctgaataagaatgactcccagcaaacagctaacaccctggactcccatctagggacttagtgagtgctccttccatgggccccttgggatccagcctcccaggcaggcttatctatggccaaggtgcccctcatgtgagctagccctgtggagagccgtgtgcctttgggaagcaccaaagctggggtgctgctgcacatcccgggccagccccaagggtaactagtagagcaggtgagattcatctctccctggtgacatggcttcctcgggccatcccccggtaccactgagaccccttccaatcagcaatcccagggtcccaggagcaggctgggctctggcctccaggagaaagaagcaaagctgatgtaggacagacactggaaatctggcccagtgcctgccacaaagcaggtggccataggccagggcacagtgtgcctttcccagggagatgggggtcaggcccaagtcatggtttattcataataaacacagccggccacactgaccagtccataggtcccagcccacttgggggtggccctcaggaagttatgcccttggaattgggccacaggagcagatggggtgactgaggcactgggtgtttccccacctcactccagctactctttagaaattgttctaaacagttgagcagaaaagcctatttgtctgactatacccaaatggtcaaataataataataaaaaagcctatgaattaccaacaacgcgtgtgtctgggaagatgtaacgggtggtagtgtcccattctggtagcttctccttgtggagagttcgccatcaagcaaatacgaaacacatttgggttaagtcattggactcagtagcatcttagagcaaacagttaaaggtagatatgagccagttcagatctagcaagctcaggagcactggagatgtcttctggaagtcagaaaagcatctgcagctactttgcagcactccatcgagcaacaccccaggggaaaggagctatgtctgcatttaatgggcagtttattaaacaccaaataagtgccgggcactgtgaaggcatgggtgggggacaaaagtaaattgcaacaaatctcagcttttagctgctccctcctggtagagaagagactggaggcataggctggcttcacgatgggcgagcacagaaagcacagaggcggtgctgggagagttgtggctagcttctccgggagaggacacctggattaaatatcagaagacaagcaacctttgactaacaagggttttccaggccaagatgcagcatgaccaagggtgcagcggtcaacaagccaacgcttcacttgatggagagggtcaggaagattctgcggccaccaggtcgccaagtccatgcttggtggaacacggcacaccaggagaacagcagggcattgcagccccagaacctgccgaggaagccatctcaggccagtgatgtgtcagaaggtgccccctgagatccgagggtcatctcgccggcagggcccagctggggaagctgggggtcctacctcttgacactgcccccacttacacaccttgagtttgaggtgtcaggggtggtaggagagctggagtggtttctcaacaaatgaagtggaagagggtggagggctgtggtgtgggcatcactgcaacatgccactgctgctggatgcgagtgatgttgaccttgctggcaggacaagacagcagcaaacagactgtgctggtggcacgatccatcagggctgggtggcagcaccgggcggcagcctgctgatgcaaggctgggaggcgggagggcgcgagtctgtaactggagaggtttgtttggattcagcattgctgaaatcctccctggcagcagatgcggctggcctcggaaatacgggagggacatgggaaatgaactaataaataagaggccaggtgtggtatctcggtgctggcaaaacagaggccagagagggtgggatgtgagggcgggtcccattcctgaaagtaaacctggcaaaccctggccagcacacccagacacaaccccggatggcatcaggctcggttaggggctgagttttgtcccctcaaaattcctgtgttgaagtcctaaccactggttccttaaaatgggactgtacaggcagtcctctggatcttagagttctgcatccatggattaaaccaaccacaggtcaaaagtattagaaaaataaataaaaataatgatacaacaatacaaataacagaagtgaaaaaatacagtgtcattgctattttcgtggcatctacattgtatgaggccttgtgcgtcacctagaggtgatctccagggtactggaggatgcacgtgggttacatgcagaggctgcgccatttcctaccaggggtttgagcatcgtcagatcgtggggtttttggaactaaccccctgaggataccaacggacaactgtgtttagagatatggactttgaaggggtaatttggttaaactgagttaattagggtgagtcttaatccaaagtgactgttctcctgaagaggagattaggacagacgcaaacagagggatggccacataaggacatggagaagacggcgtctacatgccaaggggagcagccacatccctgcctccagcatctctgtttagccagcttctcagtaccccacacaggcctccaaaggaatctgccgacactctttttttttttttttgagacagtgtctcgctctgtggcccaggctggagtgcagtggcatgatctcggctcactgcaacctctgcctcccgggttccagtaattctcccaactcagcctcccgagtggctgggcttacaggcatctgccagcacaccccctaacttttgtatttttagtagagatggtgttttgccatgttggccaggctggtctcaaactcttgacctcaggtgatccacccaacttgtcctccaaaagtgctgggattacaggcatgagccactgtgcccgactcctgccaacaccttgatcttggacttccagcctccggagccacgagagaagaaatttccattgctggggccaccctgtctgtgctgtgttactgcagcccccagaaattgatacggatcccaagcactcaatattgccctgggaagcacccagaatccagtagagatgggaagaatcagaaagggaagtgggtgattccacccgaagtggggagatgtgatcctattaaattgctgccctaatttaaaaaaaatctctttgatttcttaataaaaatgaaatagagacatagactttgggagaaaaccctggaggaggggagaatctgtgtgggttaaataagcttaaacgtgaacaacagaaagatctaccagtcagtcagtgacagaaccaggaggctggggcaacgtggactggcgtgttcttctggaactgatggagagaccatttcggataaagatgatattgctgtgactattattgttgttttgcctgatgtgatgaactccccaggggatctagtttccaagccgacgtttcgagactctgggggacacccagacgtgaccctgtgcctctgcaccagagaccttggtgaggcacctggggctgcacttgtattttaagtttctagaaaagatgaatgggtcttgggagaaaatggacattccagtgtttccttttcagaaaattcttccttaggtggccacaaagcttttataaacaaagtcccaaacaggggaggcatggatgccagggctgacgcagggccctgactccggccttgactttgggagaacatgccctttttcctcaccatcacctcctgaaatcttgcgggccaccagatcaccccttcccagtcactgcacctcggcagttttaacatacgtaggccccagggagaagcctctggctaggagatgctcccctgctgggatgggcctgggagagcctcagaggccactctctgggtcccagcccatttaatgtatgggactttctgggtcccagccctttatgtcaagaaggactttgcacatgtggaccaagccctttaacaggtccagccctctggggctgcgagttgtccatctgggccacacccggacttggaaccccactggggtgagcggctaatagaacacaaagtctcccagggtgatgcagctcccataagccttgtgcagcaccagcgggaacactgccttggtggcatgtgtgttttcaagactgagaccacagaggtgtactccaaacattctggcgctcagagtcgccctgacaaggctccggccctgctcacctaaaggccatccacaggccagtctcacaggctctgcctttatgtgggagaaagcaggggaggagcacctcgctggaaagtgagtttcctagtcagtctatcttccatcacacagtgtcaagacagtcatgacaatgcagacccacccgcagcagcactactcccagtggccaaaaggggacagcagcccaggtgtccatcaagggatggatggagaagcagaatgcggttcccccacccatacgttggaaactatagggccttaaaaagaaaggaactcctgacacaggccacaatgtgaatgagccccgaagatcttatgctgagtgaaataagccagactcaaagggacaaatactgtgtgatcccactcacgtgaggtccctagagtcatccgattcacagagatggaacgcaggatggagactgctagggactgggggagggggtggtttctaaattggtggggtattatttaatggggacagagtttcagctttgcaagatgaagagttcaggagacagagggtggtgatgtttgcacaacaatgcaaatgcacttataccactgaactaaagatggtcaagatgttagcttttgctctatgtattctaatataatgaaaaacaaatgtgaacagacatttgcacccactgagctctcactgcatgccgggcactgtgctgattccttcacacaataaataaatacccctccccttccatcagcagcccttcaagaagcatattattgtcccatttcatggataagaaaccaaggcttagaagttaagtacacgatccaggatcactcactagtaagacggagccagggttccacccaaatgtttctggttcctggcaagcactacagaaatagacagtgttggccaggtgtggtggctcacacctgtaatctcagcactttgggaggccgaggcgggtggatcacctgaggtcaggaatttgagaccagcctggccaacatggtgaaaccccttctctactaaaaatacaaaaaattagctgggcgtggtggcagtcgcctgtaatcccagctacttgggaggctgaagcaggagaatcagttgaacctgggattgcgccattgcactccagcctgggcaacaagagcaaaactctgtctcaaaagaaaagaaaaaaaatagatggtgaaagaaatgagtgagtgaatgaatgaatgataccaagtcccaggcttcatataccattgaacttggcttgttttgcaaagtttttggttggtagtagttgggatgccttttaaaacaaaataatatttaaattattcccaagtaaggggtttgactttggagtgatggaaatgttttggaattagacagaggtggtgaatgtactcaatgccactaagttgttcactttaaaaggtctattttggctggaagcttacgcctgtgatcccagcactttgggtatgtaaggccggaggatttctcgagcccgggagtttgaggctggcttgggcaacatagtgagacctcatctctacaaaaaaagatttacaaaaattagatggttttgatggtgtgcacctgtggtcccagctacttgggaggctgaggtcggaggatcgcttgggcctaggggtagaggctgtagtaagccttaatcacaccaccgtactccagcctgtgtgacagaacaagaccttgtctcaaatagtccatttatgctatgatttttaattcaccaaattattttagaaatatgtatacctgaaattgaatataaatataccagaaatatgtttactgattatgcggtatatggttgcacaaatatacacacaaatgcttcgcctgtggacagcatcgtctgagtggtcttggggaagtgggggtctcaggggtcttcagctggatttgttagggcaaagatgctcaccaccttgtgccccctcaggtgcggagcctgcagactctaacctgcaggccagggatttgggtctcttttaagcctgattttattaaaagtcccctgagcattttctcttctgaggtttgtctgcttgcctcctgaaataataagtcacatgggctaggggcactgacctgcccagactcatcaacatctatttccctttatcttttagagagaaatgatagtttactccccgagaatggttgctaggggcagaccatctgataaatagatgtgattaataatgaattaattaacatcaccttccagctgacaatgaagagaagcttccacacactaggtgcacgtacgtgtgtgtatgtacctgcgtgtgcggtacacagtgtgcatgtgtttgtatgcatgtgtgcatgtctgcctgtgtgtgtgtgtgtgtgtgtgtgtgtgcatgtgtgtacttggccacacatgcatctggaggacctgggaaagacctccatgagggaaggaacatgaagccagatgcaccacccgctatggagctgcctgcgacttggggttttacccattataggaagttaatgccccagggagcccatttctcacagaagctctttggagtgtatgtttgcagtctcctttataatgtgaataatcattttctaactcctgtttggaaaattaatcttctagtttcttagagtgtagcatagagttttggaaatagggttggtggttaatgcctgtcttagtacttgcaaacaggcttgagggactggttatggtttttctatgcaacagaatgatattcaatcatgaagaatgaggttaatagcaacctataaatatgttcctgagaatactgtctagcaacaacagcaagttacaaaacaaaaaatatatatgtatatatatacacacacgtaaatatataggtatatatgtacatatatttgtatataatgtaaatatatgcatatatgtacatatatattttgatatatatgtgtatatatatataaatatatagcatgatcctgcttttgcagaaggattttcatactcttatgtgttaaaaaaaaaactgctagaagatcacacacatcacacacgcactgaggtgtgagctgtggttatttctggcagattgttacttcttcgtttttcttgtctgtattttccacaaaaacatctattgcttgtgtaataataaaaagatactgacctgactttaattgaaaaagaaaattattgattttgctgaaagtccccagacccttctaaccccaggggagaaaagatgatgggattagaatgaaagaggatggaagtcaaacccggggcctctgttcttggttccaactctaagattctcggaaggtgctggtggctgttgggttatatgagggagagctggccgtgacacgggtgccgtgttctcgaggcagagtcttgcttacacctgctcgtgtctgtgggagaaccaaatccctcacctccttcacttggcccctccctcccaccgcgtctcacactggggcattccatcattttccatggacgctatcctgagccccgtgcttagagggccgggtggactccgctgtggccctgctctcagaggatgctgtttcagcagggtgggtgggccgccgcctggccagggcaggaagcacagctctggctatttttagtcaatcatcaacccctccgatggtggccccaggtggctcagttcctgaagatcaggcagttgaagcagagccactaaagggttcttgcctgtgtgggggggaaagggagaggtgggggcagggggcttggaaccctgcggccggccaagccctgccgtcatagctattactgggatcagtttcatcctgcctttcaatcattatgtttttcttttccacccacccaactccccagaacagaatcagataagaaaccctaaaaaggtccaccaaataatcagaaaaatcaagacgacgcacagctgtcccagtggggcttgctgtttggtttcagagccacgtgtttccacctccatttcccaaggcagggcagagccctgcccccttgtccgcctcctctggacagaccgacatgaaatgggctcggccgccccctccagtgagcccctgaacaggggagaaagactttggggaagtcacggtcagatctttctgcctctcctttggccctgcgtcttcctcccacacagcctgtgtgggctggggtgggggctgtaccagctacacagctctgagctgaacaaactcctgaaagggcagggagcctccgctgggccatttttcagactttaattgcattgagtgaaacttaaaaaggactttccgtttgctcaggctgaattccctctccgctgtgggcaggcagcctccctccaaggagagcagaacaaccagcagagagtgcataacctggctaaccatccagggctgacctgccgtagcctctagcgtagagccctgggcagcagttgtgcaagccagtggatggaggctgcccagactctgccgtcactggctgccctgctagagctcagctagagtcgagtttcataaaagcagcagcgtctacagtctgcctttatgtccagcgggtgaaagccagaaagcacagacggaatctagccgatagggctccatgctctgcagaaaacatcctgacccgaggcctgcaggcggcggctgctgcagccagataacgccagcctgagcctcagctctgccagttcccagctgggtggccgtgacctccctgagccctgctaagagcacccatgcacggcaatggcggaaaataaacgagacggggctgtgagacatctccccggcccacggcactcagcagtgctagctgacaacgcgccaggccagggcggctcacacgtccatgcagagcgccagccatggcccgcacgcgtgtgactctcttggaatttggctgatcaaaggaatcagtgcaacggagcctgctgccagcctaccctggcacacctgccctcaggagcgcccctcccctccctgctttgttcctggggctcccttctcttactgtttccaactcaggctaaacaattcctgccgcagcctctgagcctgggagaggatgagggtggggtcttcctcaggggccatcccgaggccacttcctccctttcccttccatgctgctgagttggcagaaggatgtgagagggtgcaggcaagaaggaaggtgccagaaggtccagggtgccctgcctacctccctctcttggctgcccagataccaacagccccacctgagccaacctcctaggcctcccgtgccgggtgtcctcctccacccccagctccacgggcacctgggagagctttgccatgcctgatcctcagacccgccagcctgggcgttgggcctctgtcaggaggaagatgagaggctgggggaaaagggaacccctctcctggtctggggcccgacatccacgactcttggagagtctggccccaggccctctgagggagttttctttgatatttattaacccactttctctcttggcactcggagcaaggagggaaactcagccaaggctattaataggctaaggccatccctggggagaagaatgagctcatacctacagcacaggtgccaagtataataaaggtttccgactcaggcctaaatataggctgcggccacctcggggcgcggaaggagggcctcgcatgagcagcgtgtccgccctgttgccatccagctggccacttgggcaaagctttttgacacctgtgcccgggacgagctccaccgggagatcttgcggtcacacggtcctgttccaccctaggtcagccccggtgggagccacccaggaggcaggggaggcgaaatgacatttcatttatattaatgactcctgtaaacagagagtttaataaaaaggcagtgagggaatttatgggcaacccaaggataattaaaattatttatctacttacctcccttgcttgctgatcagtctattaattatctattatatactcgctgatttgcattttagtgaagggactggggaagggcaggtgaaaagcacagaggagttagggaaccccatggtggggaccctcctctctgcagaccaaagctcctcctgcagacaccctcacgcatcgttccccatggcggtgggccaccctgaggcctgggagaagcccccatctgagaaccagctcggggggagcagaaagcattgcgtagagaggttggttcttacctgtttgcagagggatggctccaggagcaggttcccagctggaggggctgcagacctgggaaaatggtggcagaatttcctctggctgctgtgacttcaagctgcatttcaaaaagaaaacaagagaacaaaacggtgttcaatctctgaatatctagagtgcatcagacgcatgctctcccgcactcttgattgaaaatattacaggacagagtgtcacgggcactatgtcttttgaacgatacaaacaggaatgcgttaggctgggagaagctgtaagaaggtgtccctgtccaccacctcatgggtagaagatgctcccagctctgcagccctggatattgtaggtgagactcacggtatcaaaaccgaagctggggtcagaggggagagtgccagcaggtgacggggtcaggctggagtttggactgacgggggaatggccgagtcgcctgtccccaagccgggccccaggtctctcatgccagcagagcctccttggggatgaatcctcagcaccaggcccagctcctgggcgctgggctgcatcctagaggaaattgtaacggccggcgtgggttgagcagccctcgtggtttgtacttgcagcctagctaggccctcgatgggaagtaaggctgttttctcatcagaccccatcagtgtcaccacgagcagctgtgaattctccttcttggtcttaggcttctctggggttgacagtgtgaaggcctctggccaccaggcctccctgctagacactgggtgggggcaacgtcaagggggcacctggcttctgcctcttagcggctcactctgccgatctgtgttggctgtgagcagggactgagtctgccatggtccgagtgtttctgttccctcaaaggccaaatgtgatggtatttgaaggtggggcctttggtgggggtcataaagtcatgagggtggggctgtctgaatgcgatgagtgccttcataagagtgtctgtctctctctctctcctctctctccacccacccacccccaacccccagtgacaatacaccagatctgctggcacctggatcttggatttcccagtctccacaactgtaagaagtaattgtttgttggaccgggtgtggtggctcatgcctgtaatcccagcactttgggaagccgaggcggggggatcacttgaggccaagagttcaagaccagtctgacgaacatggtgaaaccccatctctactaaaaatacaaaagttagctgagtgtggtgagtcctagctaccagggagtctgagacaagagaattgcttgaacctgggaggcagagattgcagcgagctgagatcacaccaccgcactccagcctggacaacagagcaagactctgtctcaaaaaaaaaaaaaactaaatgtttgttgtttaagccacccagtgtatgacatcttgttatagcagccccagcccactaagacagagcctcacgtggcttgtattcctcaaagcacctgagagtagattttgcacaggaaggaggaaggcagacagggcaggaagggggtgtcacatgattggggtctccgctgaaactttggactcttcctccctccacctctcctgagccttcctctcccaccccgtggctctggccccgtgggcactgccccatcccctgcatgtgccccgccccctcctgctgcttctcacacctgctccttgctccctctgccccacccatgggggccttctggttggatttgacctcagggtccttgcacatgttgtcccctcctccaggtgttgggtgacatctgcatgttcaggcctccccttggagaagcccccaaccatcgtatgggaagccccctccccatcacctgccgcatctactcatggcctgtcgcatcataatgtggcttgactctgtgtccccacccaagtctcatctggaattgtaatccccatgtgttgagggagggacctggtgggaggtaactggatcatggcggcagtttcccccatgctgttcttgtgatggtgagtgagttctcgtgagagctgatggtttaaaagtggttggcagttcccccctcactctcatctcccgccaccatgtaagacgcacctcacttccccttcgccttccgccacgattgtaagttccccagacatgaggaacggtgagtcagtgaaagctctttcctttataagttacccagtctcaggtagttctttataccccacagtcataaagtagtgccatcattgtcttcatttgtgcacaacgccctaaaacggaagtttcccgaggacacgtggagctgctgcgtggtctccataccggagcagggcctggcaagccgcaggtgctcagggaatgaggaatgagggatgaatgtgtgaatgcacagctaccccggacgcggtgttccaactcctatttgcattccctgcccgcagcatggcctccatagcatgcattccccaacctgcccctagagtagatttttaaagcacaaagttgtttaaaatcccttgaagcttccctgaaggcctgggggttaagtccagattcctgagcctgggggtccaggcccttcacagtcagttttacttccttcccagggtcctctccccatgactggtgcaaacctcagccctgccagcctgcccagaccagggcgagacctcctctgtgtccccagagcaatctgtcaccaagctcgaggttcctgtagacttttttctgcactcctcccagtagaggctcccatgggcccctcccacccctctcttttctctcctacctgctccccagccccgtcctgcttctaggacagtcagcagtggctgcccatttccccactgctgagggtcctgtcctgtcggcgaggtggagctcctgcaggctcacagaggagaaggacctccaccctcctcccgcattccccagcctctgcccgggcccttctgtggagggagcaccgctctgttgctcaccgatggcacagacaagtcacccccagcgctgcctcggcattaaacatctaatgcaagttaggagcccattttccataacacacagaaacattgctgtttccaggagttcactgccctctaggcccatccattgaaccctggtcatcagctcttggggtctcggggcatctgatggtcagtgttatgcgtccacttggccaggctctcgtcccctgggattcagtccagcacgtacctaggtgttgctggggtggtacttggtaagtgtggctaatgcctaaaatgaattgatttcagcacaggatatggcctttcttaatgtgggtgggtgggcttcatccagtcagtcgaaaggcttcatccggtcagttaaaaggccttaacagcaaaaactaaggttccctggggaaaacattctgcctcaagaccgcagcaccagctgggcgcagtggctcacgcctataatcccagcactttgggaggccgaggcgggtagatcacctgaggtcaggagttcaacaccagcctggccaacatgtcaaaaccccatctctattaaaaatacaaaaattagctaggcatgttggtgggcacctgtagttccagctacccaggaggctgaggcaggagaatcactcgaacctgggaggcagaggttgcagtgagccaagatcacaccattgcactccagcctgggtaagaagagcgagactccatctccaaaaaaaaaaaaaaaaaaaacagactgcagcaccaattcctgcctgaggttccagcctgtccacccatcctacagagttcagattcggcagccttcgcaataacatgacctaattccttaaaatctgtctgtcctatctgtcaatcaatcaataatcaatcaatcaatcatctacctacctacctaggtcctgttgactttgtttacctggagaactctgagtcaggccctctggggtctctcgcaggttgggctcctggagctgactctgtccatcaacagaaccagacatcccacctccccatgctctgcccagcatgcagttctggctggtggagtgggaagcagtgcccccatgatggcagaaacggggaacaggaaggaggcagcccaaagcctcatgtctgcttgggggcaaggacagcattctcacgaacctggaacaaaccggccctcctgaatgtaaggtcaggcgcggctgtgatgaggacaacccaggtgccagcttcagctcgggcctgaaaatccctccccgtcagagctgacatttcaggacaggcatctgccctctcccttctcctcccccttcctgactatcatttctcaattctgatgatgtatcaataactgcaaagcaaaatgccacagttagcagcgctaccgtactgtaactaatcgttttctgaatcaattctcagggttgtgtgtgcacaacgaggtggggctgcatctccaaagcctctgcagcctccaggaattaggcacaccaggagaagtttcaggagacaaagaagagggctgggaagaaaaagggagcaggcaggggagagacaaggaaaacagcagattaagaaaaaaaaaaaaagagggcgaagggagattctcaacaagacagagagccggtggcagcaagccatggcctgacccacctttctagggtgcagcagagatgaggaaggggctgtggtctgagcacttttgatgggatgaggtgtggtaggcaggaggcaggccaccagatgcactgtgagggcaggagcatgagtctgccaggcgctgtcctgtgctctcggaatgtctgagtgaggatactaggccagaccagaccagggtccccaaggtgggggcaggtggtggggctggctgtcaggtgacaggtgccttcctgggaaggggacacaggggagagggcagactgctgtacacccacctgttccaagcagtaagaaagactcaggcccaggaaaccctccagctccttcatgcacataaaaagacctcaggggtctctggagttcatgcacttaagattttattggcttaataaactgtgctgctgctgcccgcaggtcttccttggcctgagcacatgtgaggatggaggggcagctctctgtagctgctgtaatctcctcgagggggagagagctggcaggagtgggagagaaaggacaggcagcttagacagggctgcagggccacagtgggaccgagggaagccctttctgcagtataactcattaacccttccagtgaccctaggaggaagctgagatgtaggatgctgggagagtctactccaaggcatacagcctgcatgctggcagagctgggacccaaacccagggcatctggctcaagagctcagcgcggcacctctacattgctcttgctctcactaaggtcagccagctgcagactcagtttccccatctgtaatgtgaactctttaatagctgccccccttgcttctggcaccttccaggctcttgcataccccactggggtgggaattatcaaaggggtagggcaggcagggctgggggaggctcgacctggctccaggggctttcttagtgaagtgccaaagatgggatggatgtcctcacaaacgtccagagcacggacctcccagtgaagcacagtgaatatagcagcctgggtccatgcctcacttcttcactcactcattcatgtactcattcatttagtcaagctgtgctgggcctgtttacctgtttccaccctgaggtctcaccccagacccccctgcaggtcccaggcccaaccatccagggctctggtcagtgtaggggagcagccacagaacccctacaatcctgacgagagtccagtaacacactcaggggagcaagggagagatgggcggggcgggacctcatcttttcttcctggagataaagtgaggccaggccaggcctgtgctccgtcatgggtaccccttgctcagagcctccccttcccacccccagatccttgggggctgtggcttcagccccgacctcccagcaaggctcctggggcagcagcatctctgcctcggggtggggggccgcttgctcccaagtttcagagcccaggtcttgagcccaccacaacccccacaagacaagaggctcccctgcttgtcctcccacctccaggagctactgtggggctgcaccaaataccttcagcctctgaaaagagggaggctgttcatcctcacttgcatgtccggctcttgcccgcaactgctgggagggtcctgcaaactggcctgggggctcaggtagccaggtggcctcagagggcagcgagtggtcacagcccccacatggtgtttcagtcacaggctcatgatcattcatggagggggctacagacaatggggtctaacaagaaagcccaaaagtttctgaatgggtcactcttgttgtttttttactaaaagggctttacgttttgctctaaatctttctgaggtgcaggctgctttcccgagtgacaaagtaggagctggggtaaccatggctccctgggagtgtgcaggacccccaaacctgctgagaagcagaggagagaggcatggcagtcaggcagctccaacaaacacaacacaccagagctgggctctctcgtgggcacagtgagaacgatcggcctcagcatcagtgatgctgggaggagactgagatcgcatacggagctggtgggataggcaggtgcagatggcctcgcaggacctggacaagatcggccactcacagccaggtccacgcctgagacaggagacagccaccaagactctcactcggcattctctgaaatagctgcactttgcaaaccactgggagtttcatgaatgaaagagtggacaaagaaaatggggcaggtttctaagtcagattctccacagtagataaaaggaacgtatcagaaacacaccagagctgcagaaaccatgttcagtcaaagaggtgagttgcaggaagaggccatgcatgtgcatttgaagaagacataaaacagtgtgagctctggtccacgcttacatgtgtgtataaatgtttttctcaagggacagaaataatagatgccaaatcgatgctcagagcggcctctgggtgtaggggaggggaacggggctgggtgtgctggaggggacttggactttgtctgtgatccttccttttttttttttttttaagactaatgcaagagaacaaagtgttagttattgttaattgcaggtagaggaggatagatatttatcttttaccttaattataaaaattctccaaaaattttttgagacgagcatggttagattgatggcccgctgcaggagtgagagaccctgattatacatgcgtgacacaaagctggtgtcaaagcacagtgttttctatgattagtggctctgtagaatctcaccggctggtggcctgacgaccaagtaaatggatgacgtacacgatggagtgattccggagggagccacttcccaagaggaagtaaaaccatttcatccctagtgatggcctccagactctagaccatccatgtctccaggaggtaggctcccctgcatccttctctctggggacccagaccctggtcttctgagcaaagcattctccataccgagaaggaggccagaaagtgctggatgcagaggcggcttttccctcttctcacaccaccatctgcaggccgacaaggaagtcagaggggacgtgaaaagagccacctctcccatcccccgacagatgggacccgcaggggtaggggaagagcggtgtctcccaggccgcgccttcacacttgctggccactgcggccagacagatgtgcaccctggtccttgctttgatctcacacggttacactttcagtgttacaagctcataaaagccacgtgatcaaattccaggtcattactcaaggaaagggacccctctgtggtcgacagcgacagtttcaaaccaattaaaataagcctggcgtttctgcgggctgccgcccgtgccgccaccctgggggtctctgagggccttgcttgcaatgagcaagatgcaggaaatgttaatggagacgcttaaatggcgcgccgaggggattctggtaaataaggccacgcggaaggggctggggagaggcctcccgagctaaccctggaggaaacttcaataaacacgagattggattggaaacaattcactccgcaaggggtgggtccgccagcagctctgggaggggtctttgggggaggaaagctatttcattccctattagttcccctttgcaagtatctgtgccccctgctgctggcactggaatctgccaaggctcgacagcacccactgagcaggctgggagcaccagggtataatttgccaagtaaaaattggagagggcgggagaggctgcgcggaagaggagaaggggtggctggtgatggtggagggtggaggggctggggctgaggacgaggccatgcagtggctttgtgactgtctggcaggtgctctgaactctgcaggatcctgtttcgggaagatcgaacgtcacccatgaaacaaacagagaagtttccagagaacaccaccccaagcccaggccagcatgtagatggggccaggccagcaggctgtggtcggtgctgtccagctcagtacagactcagggcccacctgagttgtgggcagccctccttgggcaggggcgatggctcccacctctgctcccagccagggactgttactcaggatgtgggcagctcgtcgctctgctcaatgcaatggaaggagctccaaacgtgagaaagggaagggaggtcttgagcaaaatgaggagcctgggccacacagcctgtgtccttcctcccagagcccctccccacaaggccaccacggccccagacccctgcacatctgcttttgtgggcctaatcttacagccgaaatagcaaacctcattccagtgacagtttccacatttaggaaataaaacccctggatatgcagttaaattagaaatttcagataacagataatgttttcattgttttagtataagttcataccatgcaatatttgggaagtacttatattaatttttcattgcttatctgatattcacatttaaccagtcaccctgtgtttttatttggcagccctagcttccaactgcctgattacccaggctaaacacacacaggtgcacatatgcctgcacacaagatatgcacactcacccgcaaatgtgcatgtgcacgcacacacacagatgtgcacggacacgtgcacatacacatccttcaaagaaaggagctgaccctccatgaagaccgacaaggagctggcatttcccatatgctccctcatggaacactcctcccatctcccccacggccacccccctcattcagacaaagaggtgcaggctccaattgccactttctcaaggccacacagtcagcatatggcccggctgaaattgcagacccagttcattcgtattccaaagtctgcactctttccaccaaaccagacccaatacatcaaattttagatgtttcttttcaaacagaacggccataaggaagttgctattgattctgcagtcaggccaatggccttggctcagacccacacggacctcagaacaaagacgcagatttgagctggtgaagcccccacgggttcagcctcaccagggttcacctgtggggctcagggtgagcacatctggcttccacacagaggctggtggtttgggtccaccctggagggttctgctggcaattgagtcctgagcaggcactggcagcagcaccgatgcccgtggcagggccttctagtgaaggggatgtttctcccctggacgtggtctcaaactcaaaggggacaaacacagacttgaaattgtctgcaaattggcaaggaatccctaaactctggcttccactaattaactagctgctttccaggtaactagtaggtactttaggcacttgttatgtaagaatcacaatcttaaaaaaaaaaaagttgcaatgttcgatgaggccatggtgaacctaagggtgccaccttgtctacctgggccatcactcggcaggcaaagagattcgatctggctggcaaatcttgttctttatgtgagcaggacaattctcaagtaacatgctaacttccctatcttgagttgtcggtttcatgattatttttctaggaatggaagttaagcttgccgcttcatcatttctagaaatgtctttaccccctttaaaaaaactgtctgtggattgggaaaaacctccagccccttgttactcaggcctcatctcctaaactgcctggctgctgctgacaaagttgctgagtagacagagcttacaactggggaggtgtcagccggagcccttgccatggtgatggctgattcctatcatgagtggaacaggagcattttgggcctgaagatctggatgctccgggtggtgtttgctcagccagcagccaagaagtccagcaaggagggaagaggagaaggaggtctgtgtgcttcacccaaaactccagcacggaggatgctgctgagccaaaacccaggagatgaaactgctgggggcagaggagctggggaggtctgggaaatacaaacagcagcaaatctccccactttatcttcatagccaccaccccttacaccatatggctccccctctcagcaatgcagttgagcaacggtctcagccataccatagtggtgagggtttcatgatttgcctaatgagaggtcttactggcaaatttcatactaagagttggatgttgaaatttgactgtggggccacgtgcggtggctcatgcctgtaatcccagcacattgggaggctgaggcaggtggatcacgaggtcaggagatctagaccatcctggctaacacggcgaaaccctgtctctactaaaattacaaaaaaattagctgagtgtggtggtgggcgcctgcagtcccggctacttggaaggctgaggcaggagaatggtgtgaacccgggaggcaaagtttgcagtgagccgagattgcgccactgcactccagcctgggtgacagagcgagactccatctcaaaaaaaaaaaaaaaaaaaaaaaaaagggatggagggagggatagcatttggagatatacctaatgttaaatgatgagttactgggtgcagcacaccaacatggcacatgtatacatatgtaactaacctgcacgttgtgcatatgtacccaaaaacttaaagtacaataattaaaaaaaaaaagaaatttgactgtggaaggagggaagacatgagggtgggcggagggaaaggaagccagcaccggatgtggctttcccggaggcagcccactggaaaagcggatttcattatagtcaggtggttgttttttaggtcacctacttcccagacggtttttcctgcttttctttcctgttacaaagttttgacatattggagccgggaaggaagaaaagtcgcactgtatcaccaagaagtaggggacccaggggctcagtgatccacagcagaaaggaagaggcgaggaaggtaggagatgcagagaaaggaaagaggcagaacgggggctcctgcaagtgcggagatgaagccctgtcccaggaggtcccacttgggctgccggagtggtgatgacccagggctcggcctactttcagcctgagaatcctgagagaaccccctccaagagcagcctgggcagattggtcttgtctgggctgctggtcttgtctgggctgctgggctatgtctgggctgctggtcttgtatgggctgctgggccagctgttcttatcctggctgctggtcttgtccgggctgctggtcttgtctgggctgctggtcttgtctgggctgctgggctatgtctgggctgctgggctatatctgggctgctggtcttgtatgggctgctgggccagctgttcttgtccaggctgctggtcttgtctgggctgctggtcctgtctgggctgctggtctatgtctgggctgttggtcctgtctgggctgttggtcttgtccaggctgctggtcttgtccgggctgctagtcttgcctgggctgctggtcctgtctgggctgctggtcctttctgggctgctggtctatgtctgggctgctggtctatgtctgggctgttggtcttgtccaggctgctggtcttgtccgggctgctggtcttgcctgggctgctggtcctgtctgggctgctggtcctttctgggctgctggtctatgtctgggctgttggtcttgtccaggctgctggtcttctctgggctgctggtcttctctgggccagcttatcttctttggtggcatgtgggaggcttgagtggctggtgtctcctgagactagagacctttccagaaggctgtggtggacttgcttcctgaccactgctggtgtgtctcctggagggagtgactggaattcactcctgcatggagccgctcttggtgctgaccctgatcccaagccaccagagggacctcccaggaccagaggggcattgctggcagtccagacccctaccagtgctggcagcctctgccagagacagatctgaacaccttggccatgcagcaggatcccacgtcgtgccacttggggcacagactggagaatgcccatctggtcatttcctgccttcaggcagtagccctcattaacagcttttggttctgtgaggatcagtgctattttaaacacttcccagcagggaaatccgtatacctgccctcccttggcaaaccctgcccatatctaaccagctctactgccagaatgagttcttcctcccatccctccaaaatcctttgcaacgaaaccacgagtctgtccccacattctgtttggagagtggctgctcaccaccctctgggcgttgccaatagagccctcaactaaaaccaggcacctcaacgcaggagccctgcccgcctgctctcggtgtgagtctgtcttccccctaaaaccttggagcagaactgccactgtttgcagcaaaaacaactttgaggtgctgttctaggtctcagaatcagagtccgtctgtcaccatcgctaacaggtagggggaaaacagattattcagcctcctgagaagccaccttccctgcacattcagagtccggcacattctgccaaaagctcccgtcacagcaacactggatcctaaatgtaactggtggttccacctggagccattcacagaggcccaagggtcccaacagagcagatcctagaggcccccgtgccactgccaatatccatgtgccacgaggcagctcagtgattggattggtggcctttatgttgcagattgagatggtctaaagcacaggtcagatgagaactgcaatgggctcaaagaccatgcaggagcccagggcatagggacaccacagtcttctatgggctcatttcccttctacaacgtacagtgatgctggggtctctacctcatgtcttccctgtgtctgcaccaacttctcagtgtcagggaaagaaaaagaacagaaaatcaggacactcttgcaatggcagcaggacgtagagaggctatggcagccaggtccctgagctaaacgttcagctagacccctccaggtccggccccaacacgcccactcctaactggagccgagacacagaagcccttctgagcatgacacagaaacacagacatctaattttcccatggagcgcaggtgagaaagttctcatccaaacggtggtgatgtgggagctctaccatcgccagtgtcctagcagacaagagagatgttagaggcagagggaaggcagcagtgagtcttcagcaggcacagaggaccccataaggtgcacagtacaggatgccaaagagctggaattgcgagccgggctttcaggaatctggctttttttttttttttttatagacggagtctcactgtgtcacccaggctggagtgcagtggcacaattttggctcactgcaacctctgcctccccggttcaagcaaatctccagcctcagcctcccaagtagctgggactacaggtgcacgccactgaatccggctaatttttgtatttttagtacagatggggtttcaccatgttggccagactggtcttgaactcctgacctcaggtgatccacccgccttggcctcccagagtgttggcatacaggcatgagccaccatgcccagccaggaatctggattctaatgcaggagcagaaactgatctttgaactactctcaatgttacctgcacaccaacaattatgaaataaatataaaaagtgacacagagaaacgtcagggccaggaaaaaagagatgggtgtgatgaggaggggcaagaggacttgcaggtgagggtgggttttgagctgtgattcataaacagtaaaaaatacaggggggtgggtggcagggagaagaggggcacctcaggaaagaagggagagagagaggaagagcaagaagctgctctgtggagcaacctggtgttcagcggaggctggggctacgcactccgaactggaatgctgatgggctgggggagagttccaagtcattaagtgagatggcacaggtggggtgcccaggcaagcttccaagcacagagcttggcaccaagcacgccctgagtagaatttagctctcttcctctcccttctccatgtcaagtgtaacagattgggctagtagattgcagagctgaggacctggctggagaagctcgctttcacagggaagatggaacatgtgtcacgcagcatccaaaggcaatggtggccaagcacgaccccgaagggagggggtacagaggagacacagctgggtccccagccgctgagacagggactcctaggcaggggttgaggacggaccaagcagcttctaggggtctgggaagccccctctgggcctgtgtgttcatatatgcatgccccagagggaggataccaggcttgttttgggttctcaaggggggcctgggatgttcagtgagctgaccggcagcactggagctccccaagtcccttgcccagaagttgccttcccagctgtctacacagccgactgtctacacagctcaattgcaaagcacccagacaagcgtattggattgctggcactgcatgtggccagctggccctgagctcacttgtcacaagcattagtttgcaagtaagaagtacgtgggggcattgtgctgggggacatgaaggctgggaaccaagcaggcctggtttagacagatttctcaaagccttcattaggagggggctcctgcaaagctttcagcttttctaagcctcattgtcttaggtgtcaaaggaagattattgatattctgatcccactgtcactgggattggaaatgatgctggtgaaagacacagcactggcatgcaacaggagcagatttgctattgttttccacaatatcaagaaaaacattgagctagggcatctcaagaaagctccctgggtctggagagtttatttccaggagccacttactctttcagtgtttgtgctgagccattgctgtggcagagatgtgggatggatgctctcccaagttcataaccatcccagggcagttttcctggagatggagacacgagagatggttgcgagaggtccactgttttgtgaagtgagtttttaagccccaccttgccaccctgggtgatgataacggtagcacgttttgcagccaggagaagggctgtaatggcagctgaggccaccaacagatgcagagtactcagtgactccacctgcccacccagctggacctcctccccaagcctccctgcagcgggggctcggtcctgacctttgtcctgtttgatgctgccaggattactgaagaagtaatgtcctgctcagctctcttctgccttggccagagatggctgcgtgccgagagctggcgagagaggcatgttctgcccgtggccggtggtgtgtggagcaatgcaccaatgcgagcccgcagtgagggttcattaccatgcagatccaagttggcgaatggagaccaattgtttgggcagattgcttactgtctagctagagaggcatgatgagaactcaggatcttgcatttccaggctattttgcaaatcttcaggtgcccatttctaggaggaacagcatcactcaagtgcttctgtggtgttgggtgcagcaggtgggagatgggaagcccgcttcctcttgttgagccctttacaggggtcattactgttcctgggagcttgccagagccacacagctcaccttagctctgcatccttcagtgggtcaggcctggggactgccaccctctcagggcctccctgcaataggaaagggctgagggatgagaagggagtcacttgccagcctgcaagcatctgggaaggaactggctttgggggcttgggtcactgtcacagccaggaggagcagcagcactttccctctgcttccagagcaatctgccatggcccagtggcagcctcaaagctggctgacatctggcaaatgagcgtgggatgcagcttgagcttccagagtgtacacgctcccttctgggcagaccccaggggctcaggaagcctccgaagcaaactctgttttcaagggctagtgaggagtcacagttggcacacagccctcccattggcagtgccccttcttcgatggagggcatgtagcttatcctcacatcctggcagtagcccctctggtgggcagacaagcaggtgacgtgggcaaagcatttatgaagatgaatctgcaggtggcccccagctctgctcctcagaaagcctcccggccccatttggagttcagaggacctggctcctgggtggagggaagggagacccttggagtggggagcctggataggggagagcaggcagccttcctgctgcagcacggccacaagccaacacctggccgagcaacctgcacccgtgggaggcagacgctcattcatcacccttgaagctcagcccttgcttcctcagcctctgggcaggcagagaagcaggaagagggctgaagagccatgaaatattgcccacagtccaaggtggggtcaccatcccaaggactatcctctgcctgggattttctttaggcttgtgtgcaaagacaggagtgtatcaaagcaggagggtgtctaggaactgcagaagtttagcgcactcagcgttgggcatacccagccttgatgactctctagaaaatgtccaagcccttcaaaaatgttgaggcctgagccaattttcccccaaccctgggcaacaccacccctgtgcccattcctgctatgtgctgggccctgcatcagggagaagcagacggaggaaactgagccaaaggacaaatggtggcagggagctgccccctttgcatccccagccccctgggtgggctcatccctggagattccacaggtgggtgagggcagcctgtggggtgcggccttccctggagatgaggagtttatagctccctgggctcaaatgtggtgggaaatttgaggacttgggtcatctcattgaaagaaagagctatggcatcagagggactaatttgaggagcccggcagcactgtggggaaatctacttatccctaaatgtcaactacccagttagttacattttcccaaccaaacggccccattgacctcaatcctccatgtgggagacccgatagagacttgtccttggaatggagggaaaaggaggccaagggagaatgtctttaaaaggtcactcaaagccacctcttcttaggacattaccacctcctcaccctgaaaaaataatcaatcaataaaaaacaaaaagcacaaccaaaatgtaagtacagctgcagtggctcctccctctctccctttccctacctccccctccgttgcctccctgctttgagctccaacctcttggatatttatcgttcgctccctcctaaatcattcctgacggctggactgctcacactccattacagggcgaggctgtgcggagtcgcagttccgtttagcttgcagaaaaaggagcctcctaggaaaaacccacccgggagctgtccggtgctgaactccggcatgatggacgattatggaccaactgcactttcagagggggatagatttatgagcggaagagacagctagaagagtgtccattactataactcactgccctcttcagagatattctaatcaggcatcctttcctaccaccgaaaggcgcaggttaagaactagcaagaggggaaatcaattacatacttctggggcggtttcttccagagcatcactgtctgtggcattgggggtaagggcatcaggaggccggggatgggggtggatggtggtgggcccctccacctgccaaagcaggcttcccatcagcacttcctagcgtctcccgtcacaccactgctcttgatctcttgcaactggttgagaagctaggaggcgccaggatgtccctcccttctcgccctgcacggatctagttgagatttactgacaacccaggatcacgcagagggctgcagtgaaaatatctggttcttcctggtcgcccatgcactttgacactgatgtgcacaggggaagggaagagagtgaatctccatgggatgctggcctggggtcaggcactacactggatgccgtctatatattctttcaccataatcttattcttactttataggtgagagaacaaaggcccaaggaggtgccaggtttccagcccaggcctgcccaaccctctctagacaacccgcaggcacagttggcagtgcagaggtgcccctgggcactccctgccagaggtggcgagctccctgctccccagctcctctccagctgcattactcccgacatgtctcctctgggcccagacctcccaccctctaatgtggcctcagtgtgaaccctcaggccctgtctacttgaaccccagccctctagaaaagacagctacaaacagatttctcccatttctacaggacttcagagttcacaaagcattttgacactactgaacctgaccacagcccactgaggtgggcccaaacagataattttaaccccattttaaagatgaggacactaaggcccagagaggttaagtggcttccttgaagctgcacagcacaccaggagccgatctggaaccaagcccatgcctcctggctctgcagtcaggcctgtctgacctcactctctgcttcccagcaggctgctctgagcacagtcacccttgagcatttccttccctagggaccagcctgggctgggtaccccccacaccttccccacaaggctctccctctgtggttccagatcttctttcctttatccattcccttccctcgaatcactaccaggtcagagaagactggattttaagtcatgcaaagtgatgatcacacccttgagggtctccttggttcacacctccctgggaagggtaagtcctccaactcatggggagtccttggcaacctcaccctggcacaagctctgagactccagtcaaaggccctggacatcaggaaattcaccccacctcctgccaggaccctggtgttctccaagatgatgggtcggtggcctgagcgatggtgtccagctcagcagcagcgaccacggatgaatgctccagagccaggtcctaaccgggatgaaatcaggctgcacctgagagcagcagaagctcaaggtgtctttcttttgttgcttttatttttatttatgttttaaaaaactacagtcctacctgcctcacctgggagctcacctgtggctttttcacctgggaaaatacttctggttttgccaagcctgctatagtcatccacttattccttctcttttttttgagacggagtctccctctgtcacccaggctggagtgcagtggcacagtcttggctcactgcaacctccgcctcctgggttcaagcgattctcctgcctcagcctccagagtagttgggactacaggcatgtgtcaccacacctggctaatttttgtacttttagtagagacagggtttcaccatgttggccaggctggtctcaatctcctgacctcacaatccacctacctcggcctcccaaagtgctgggattacaggtgtgagccaccgcacctggccttccttctctctcttatctatacaaacattgatgacaaaacctgaccttgctctgggcaatcaggaaaggttttctgcaggaggtcacacctgctgagcagtggaaaaggtggtcaggtagaaggagagtgggagggcagagcccgtgggtgcaaacacgggcaggactcatggcatactattctgtgtgtctggaacggagatgggatagatccaggaggcgtgaggctggattggggagcaggggcaaggaccccttttgatagaaccttgccctaagcctcttactctgcagaactggccactttctgctgagcattcaggacagggtcatccactgtgcagaccacaccgtccattgtggcagggctatctggtagctggggtgaccctggccacaatctgtggctgagatgcctggccccatagccactggcatatgtggattttgaacacttgaaggtttttgggagtcagcatgcctgaggaacagaattcatcactgtatttcattttaatttgattcaatggaaatggccacccatgacccgtggccaccgttgcaaacagcacaggtctgggtggtgagatgctgctgacagcccccaggtcttgcacagcctgaccctcgcaggcactggctgagtgcacttcttgacaagaccctcatgttcccaggctttgagacccaagcaaactgctggcaacagagcgatggaagggggagtatctctctccacccggagacatttggcttcacctgtgaaaacagcatccacttgatgaatggccgtttcctgcactttgtaaaattaaattcttggcttggaccaagcagcgcagggttagccgtggttgcccagggatagggatggggcatcaggagggagcctgggcagcaaaggactcagggtccgaggtcctggcagctgccacacatggggtgggggagatcatgcaggcagagagctgaatcagcaggtgccccaggtatgggctgaaggcagaggggaagaagtaaagaataaaaatgcaagaaaggacccacgtggccaggagggacagggaggaggctggatacagaaagatagtccccaccccacccactaaatcccagccctggctcccgcagggccaggcctctccagggaaccattcacatctgctctgagcttcccatggtgctcctcccatttcagacactggagaatggagggatccctaacatttccaacccaactctgctctgtatggaaacaaactcccttcccacgccattattaccatcatcatcttcactagtgcttggtccagtgtacccgtcatggtcatcctggggctcctatcaagggctcttcacccaaacctgtcccccatcctggccacactcctgccggtgatcctgtgcaccctggggaggaaggcatggaagtggctcccccagcctcttctcccaccgtagcagttcctgctgatggtgttacgtggccacgccatcaacccagatcacccgtgagaacttccttcattaaagggccactatataacctgaaattattccacaccgtgccctctcctccttccctggaaggagctctgcatgcctggtgggggctctgagcaataccctctggtccatgtctctcacctgcaaagtctagggaagctgtaggccccccaccccggcctaatggccagccccggtgcatcttcaggaagacacagaggcaccctggcccacgcctgtcctggattcacccctcgctctcccaggagatctccatctatggctcccatcccggttcctcttcaccgggcttctcttttaaacaaatggctggtcgcacattttagcctggtgtcaccaagggtcccacgcagagtccggctccttctcagacccttcagccctgacctctcgtgctgatctgtccagagtggaagaaatcactcatcccaggagcacctctgttcacacccctaagtcacagccagaaaacagcccccaacacccacccaggcctgcatctctcagctctccattcagagctgaagagttaagctgggcagaaaaactgaccatcacatgaactccagagactcttgtgtgtgagcatgtgtgtgtgcaggtgcgtgtgggcgcgcgtgtacctgcgtgtcttcactgcttctccagatgagtttaaccccgctgtgggacacagcaatgtcttctctttcccctgtgccccctgacccccggtagagtagacactggggagtgtcaccctcattgaggtgaaattgaagggtttggggtatcatgctggtttcactgccatgcaggggcttcccctcttgccctggatggttctggaattgccctaggactacacaggagtccccccagttttctcccactcagaccctcactgtcatggtcaaaatcccctccaccgagcacaacgatgccacctgttgtggttttttttcttttcacgctgcagaatcttgggtcattcctgcagatgcttgaaatagacgaggggatattcaggttccacacgcttctccgttttacagaggcggggttttcagggtggcagggggtctgatagtggtcccactcctgtctcccccaggcctctcccacacccctgactctcaccagtttctggctctgggacgggcaaaatccagccccacggccaccatgtgggcttggggatcatgaagtcacgtggtggggctgtgcctggggggtcttctctgggtctgaaggtccttgggccgctccctgatcaaccaggtcctactcactctgagccaaggatggaccctcccttcggagaagccttccctgactctgtggccaacaggaccttctctcccagcttctggtctcagggctctgacagcctggggcagccgtcggccacgtctcgctgtgttctgacacacactgggtctcggatccttgtgtcatttcactctatgttgctcctgtttcatgaatgtgggtcccatcccgctaactgaccggtatgcttagattttaaagaaacgtatatctgcagcccccaggctctaagcatctctttccaagtatttatgggttctgtcccctcccagaccgcccagctcaacatgggcaaaaagcaaaagctgtgttcctggcaccctatttatttctgttccttgacaacccctccctgagcctcatggacttcaagccctgctgtcccttcggccaccatctcccatgctcagcccagaagcatttcccctgccgtttgcctttcctcttcattctcactcttttccttacaagtggtccctggtcgccacatgtctgggatggccacactgcctctcccctgtcccgttctgttcacattaccagagtcaacaagccccttcctgcctccaaagcctctggggggtgcatcactgtcagggtgggtgtcaagacccaccccaagctgaacctggggacccaacacaaatgtttcgcttcattccagaggcctctgccccccctggacccctggagaatgtcctgcccgtggctccagcctgcactgctcagtgttgttattagacgttttcacaaatgcagattctagatctcctaagagattgaagacggcactcccagaagacggcaccccatcacaatcacttttgttctctgctgcacctgccccggggctgggcaagtaattgacaccgcaaggactttctgaactaaaagcgtgctgtggcctgcccgctgttaacacccccatcttcccactggaagtgaggccacacagctctggtctttagtgacactacaggggacagcacagaatcccagttttcttcgactatttttctcaatgcccctggaagcacggagggtcccgaccacccagtgtgaagccctcctgtgcggctcacagggccagcctggtcctcttggtagagacgtgcaccccacgatgacagtcacttcctgctgctctagactattctgtttttccattctatctcaggtctgagcaaccacgtgtccagactccttggggctccaggagcagacccagggctcccggcaggtctgctctggtcccacctacagggtcatccgaaaaccagagcagccatgaactagcccctcttagcggctgcctgccttctttccccacaccccttgccatttcctgctccttgtctgctgccgtctgggctggaattctgtctccaaattggagatcactccaggccctcaggactggaatttgagccctgggaggggaagggaccatttgtagctcttttctttttttatgctgctgagcgaagcagggatcaggctgagcacagctgccagggaggtggtgttttgtgataaatcaataaactgctcggggtgggagagggaaagggatagatagggagccctaggatgctggagaggaggcaggctctggggtccacgtgagcacctgagtcaatgaacaaaaagagatgagagacggggtgcagaggggaggggagcacatgagtgaggggcagccagagacagagacacagagaagtgtgggggcgtggggagacagaaacatagaaccagagagacagagagaacagagacacacacagagagacaaagagagacagagatggagacagagagacaaagagagatggagacagagagacaaagagagacggagacagagagagagagacagaaagacagagcctgagagacaaagagagcagagacacagagagagacagagagataaagagaggcagagacagagagggagacagagccagagagaaaaagagagacagagacatagagaaagagagagagatggggtgggggagagagagagacagaaaaacagagatggggagacaaagagaacagggacagagagagacagaggcagaaagacagatagacagacacagagaaacgggagggaaagagacagacagaaagaggtagagagacagagagagagaaacagaggaagagagagagagatggggtgggggagagacatatagatagacagagacatagagaaaggggagggagagagacaaagagacagacacagagaaaaagagagagagagaaacaggcagagacagaggaggacaggccaggggagaccctgccagcctttaccagggaggagactgaccctccaaaaccacatttacacgcagcagaccagctcacagcctcagtgaggcctgcacccatcaaaggatttgggggaaggtgtcctcgcttcctgaactattttcattaaaagaaaaaagttgccgagctggcttctccacactggcctcctgcgtactgtgctctgcaatggtcttgctttcttttgttccagagacacagaactgtttaattctcatcccttcaatcaatacctggtgtcatgtcatccaaagccattatttttacaccagagaaaaatggagaccgagtacagtataaagagagagaggagacagaaatcattgcttcagaggctgcaagtgaaaacctcgctcagagccacccaacctcagcatcatccagctggctctgcaggtctcctggctcccagaacaaaagcacctggagaagcaggtgcaggagaggaaagtcctgggggaagaatgtcccatgaccccagagaggtctgtctgatggcaaacagcttcttcccaaagacacacccacagtcagcccctggatgggagttcagcaagggctgagtctcccccagctccctgatcccatcctcctctccctccatacctcccactctgcctctgcccccattcctgcccttcaccccacgagcacacacagcttccacatcctcaagaggcatcatcctgggaccttccccctctcccagatgccgaggtgtctcctctgtctcctccagactctgtctacactgccacatcgtcccttcctaggaattggaatctgcccatgtccccacccctcccttgggaattcccaccctggtcaccaacgatcccctcattgccaaatccagcaatccatctcagtcctgccccatttcttgtttctgttgcttttacctgatgatccttgaaactgcctttttccatcacctcttcctgtttctaccatccacccattcctagggccccagttccttccccacacctcctaaatcacaatctttagcttgggcctccctctctcgagactcctgtgtcctagtagacactttcacccagagatgtgccccaggtggcttcactggcacccaatgcttctcctgcatctgccatctcagacagtggcatcgccagctgcatggcatccagacaacaaagtggaatcatggtcacccactcctcatgctccgtaggttacagggacttgttggtgtctcggaacctgtccctttctgggtatccactgcttctgacgctgggcctggattcttggaattgcatccttagtgttcagatcctggaaccactgtttcaaaatctcctccttacctagagatgggcttcttaacccttcggggcccctaggaaacctcttcccagaaaaggcacatatgtgcacaaaagtttgcaaccatttcaggaggctcatgggccaactggagcccatctgtgaggcctacagtttaggagcctaggtctgcaggcccaagactgagctctccagggaaccaggaccatcacactccagctcccacacatctttccagcctcagtttcctcgtctgccacatgacagcagtaatggacccatctcagaggatgcttgtgagcttgaagatgcagtgaaaaccacatcgagctgtgcctgttgcctgtgcctggcacgtagcaagtgtctcaccccccaaccagcccagcccaccctgcacagacacagtggcatttctccagcatgctgggggccttcccttgacaaaccttggacattctgtctagaatattctctgccagggaaccctctcttaccctctgaaacctggctcagatgccacctcctctctgctgcctggagcctcactagggctcccagagttactgtcatcacactgtgtctgcctctgcatccaggtgcttcattagaggggcgtatgtgggcctctccctgtgtagacgaggctgccagaggatggggctggctggctccagcttctcctgcccccagatgcacagactccagcacacagcaggtggccaacatgagtatgcttgatttgcaaatgaaacagatggagatgtccatttgcgaccaaaaggagatgcctaggacagagtctgggggacctgcatgtgccttctttcacccttgtgagggctgagaaatgaaacatcatgtaagtgtatgtatatgtgtgtgtatatatgtatgtatatgttttcacatgcacgttttgctattatttactttaacacgcacagacactattgtcatcaccctcgtcttacagtggaggaggctgaggtccgacacttggccatgcacggatcctctagaatcaggactccagccagcctctcatctctaggtcccaggctacactggagtgtccgtgtacacaggcatgagtccacaccccttggcgcagaacccccagcctccgccatctggctcttgctttctgccctggttttcctccagtgacatctacaaccacgctgggtctggccctgctcccacgtgctcatgctcacaggtgctgtgctccacctgagcccctccaggccccacttgctcccgtcctctcgtcctccacatctcagatccccaaagccttccctggcaccgcacactcaggcaatctcacctgcccctgcactccacgtagcctgcagccatcttagcttttcctgttcaatattggaactttccagaaatgctaccctagttgtcatccttatcctattcaatgggtttctacagaaaagaaaactcgctgtttctcacacctgccggtctgcctgcgccgcttcgtagacaccgccctccctctgtgctgtttgccatggactccagatagcttcacacacattccttcatttcaccccatcacacccgttcttttaaatcccactgttctggccgggagcagtggctctcgcctgtaatcccagcactttgagaggccaaggtgagtggatcacctgaggtcaggagttcgagaccagcctggccaacatgacgaaaacccatctctactaaaaatacaaaacttagccgggcatggtggtatacgtctgtactcccagctactcaggaggctgaggcaggagaatcacttgaactcaggaggcagaggttgcagtgagccaagatcgcaccactgcattccagcctgggcgacagagtgagatttcatctcaaaaaataaataaataaataaataaataaataaaataaattgaaaaaaaaaataaatcccactgttccaggtggggcaaccgagcttctgaaaagctgaagtcccctgtccagcagcgcatggagacagaactgtgcaaagggttgggtcacattcagctgtctggactcacaagggcagaaatcagtgagacccacaggtgaggtccctggcctcgtcctctctcctccacactggaccttcagtaaagacggtgctgtcctcaggcccgatcccagccctggctcaaccaagggcagctcattcagggggatcacaacaggggggtggctctgaaccaggaggtgcacatagtgaataccaacagagaatcttccagagctttggggcttttactggtggctgatggccttcaggaggcaattaaaaaggcacaataaaaagtgaagtgggccgggtgaggtggctcacgcctgtaatcccagcacttcgggaggcagaggcgggtggatcacctgaggccaggagtttgagacaaccctggcgaacatggtgaaaccctgtctctactaataatacaaaaattagctgggcatggtagtgcacgcctgtaatcccagctacttgggaagctgaggcagaagaatcgcttgaacctggagcagaggttgcagtgagaggagattttaccactgcactccagcctgggcaacagagagagactccatctcaaaaaataaaaaaggtgagtgctcttatttcgatagtcctgactctcacaccacgggaaaggaccacgtcatcttggctcctcctaggatcagactccaggctaggacttttcaaaggaaacattgtgcttacctgacaaaaaaaaaattaatcccaggtgggatggagccacacatcctaacaaacttctccttggcatctctggcaccactgctatttccagaaccatctctcaaagcccacgcacagcacagctgcatccgggcacaaatgcactctcgtgtgtttgcactgacatgcatgcctcaggtccccgtgggcacatgcgtgtacaagaagagcccattcacaaatcggatcaagaaaatgcagttgcgccgggcacggtggctcacgcctgtaatcccaacactttgggaggccgaggcgagcagatcacttgaagttaggagttcgagaccagcctgcccaagatggtgaaacctaatctctactaaaaatacaaaaattagccaggtctcgtggcacacacctgtagtcccagctccttgggaggctgaggcagaaagaccagctgaacccgtgaggcagaggttgcagtgaggtgagactgtgccactggactacagcctgggcaacagagcaagacccagtctcaaaaaagaaaaagaaaagaaaatacagttgagtttactatatatatgtcacatacacacacacagagttcttatagcctacctctgaaagagaagtggcaggcatgtgtctctttttcttaaatttttgcttctgtttcatgtgtttgctggcatacttctccagattttttttttttttttagacagagtctcacagtgtcacccaggttggagcgcagtggcgcgatctcggctcactgcaacctctgcctcctgggctcaagtgagtctcctgtctcagcctcccgagtagctaggattacaggcacctgccaccatgcccggataatttttgtaattttaatagagacggggtttcaccatgttggtcaggctggtctcaaactccagacctcaggtgatccacccaccttagcctcccaaagtgctggggttacaggcatgagccaccgcgcctggccttctccagatattttttaacgggctggaaggaactggggtttctttttgatccttccaattgtcacctgcaatggtgggaacacagactggggctgtggtttgtgtagctctccgtggtgctgccctgagccgagaatatcagcagacagggagagtattgcaacccttctatgactgtagtttgtgaaatttctgtctttccatggaatttcagggtgatgctggtgagatgggaagagtccctgtgaaacagcttttccagaattgggtttggatcccccataattcaactccctgaggcaccgcaccgctgctattagcctgagaacttatttattaaagacttcctgtcatctgcattggttttcagcaaactatactcacttaaggggtcgacatacatcccccaggagtagaatctgtgagtttaccattccctgtcctttttggaactcgcattgctacacatgtccccaagtgcttcaacaaccacagagggaggagaggcgtgagatgcagtcagctgtgtgttccagaggatgcctttctgatgactgttgcttttccttgttagccctggagacaaataaagagctagctcaaacttgcttggccctgtttctactcttccttcccataatccttaggctattgtttgtgtttggctgtgtgatcagaacatttgcatcaaacccactagtgagagggaaggaggcggttctataaaaattcagatttagggctgctgaattctgaattctgaattctggggaatagaaaatctatttaccaagttgtgcaggtgattgctttcttttcttttcttttttttttttagacagtctcactctgttgcccaggctagagtacagtgatgcaatcatacctcactgccacctcgatcttccaggctcaagcaatcctcccgcctcagcctcctgagtggctgggactacaggcatgcaccaccacactcggataatttttaaatttgtttgtagagacagggttttgctgtgttgcccaggctgatcttgaagtcctgagctcgagtgatcctcttgtctcggcctcccaaagcgctggggttacaggcatgagccactgtgtccagcattgattcttagtcgcgctgaagcttggaaaaccattgttctcaaagtgagaattacccatcgcctacctcaagaaaaggcacagtgcaacaccagcctcacccacgagctcagtagaaagacagattctcactggagctgggtgggttccttattggagctggtgggagggaaggaggaagtggttccttaaaacacagactgctgggccccattcccagagtttctgattcagtatgtgtggaatggggtctgctaatttgcttttaaacaagtttcaagaaggttctgagcctgccggtctggaggccctgctgagagaagagctgtgctgggagacgataactcgggctggcacagcaactgttggcctggaagttggggtctgggtcctcattttggtcctaaccttagacaagtcactcaagtcccttctcctatttgattcagaattttttttggcataaaacaggactggattgaacaggtgtgcagttcctttctagcacctacattctacgactccagcccttgctgaaatgcagcagtaactggtgaccaggacaaacagctagcagagaagcagagtcctgctgatgccccctgttctccctctgtctttcagagtcctgtaccctactgatgttaaacttctgagcatgggccgggcacggcggctcacacctgtaatcccagcactttgggaggccaaggcgggcagatcacctgaggccaggagttcgagaccagcctgacgaacatggtgaaaccctgtccctactaaaaatacaaaaattagccaggtgtggtggtgcacgcctgtaatcccagctacttgggaggctgaggcaggaggattgcttgaacccgggaggtggaggttgcagtgagccgagatcacaccattgcactccagcctgggcaatagagtgagactccatctcaaaaaaaaaaacaaaaaacaaaaacaaaactctctgagcatgatagaatctatgttgggagccaggctgccagcagctgccttccgcaagccccacctcccagaagtgaaagcttctattcgttcttccccatggggcagggttcctgggcttacagcctgagccgccctgtgattttcagagttctgtgtaaagatggagtgtgttcccctccacacctccccagctgcatggggcagagtgacttcactgcacatcctggtgtgtctgaaaagcgacatgatttgggggtgattaaaggcaacccacatgcttgatgagcatgtaattattgcctgtttcatgacacgggtctggcactcagaaacctggagacgcaagcacttgcagtttttcatgacagcctgacttcatccgatgaatgaaaaaaaaaagtaaggaaaagaaaaaagatgaaaacatctgtaatgaacatctggattccattgctaaccatgaaagcaaattcctcagagtcagcatgccggagagggctgggaaagggtgtatttataaacaactgtggtacttgaatcagaaaaaatgcccccaaacaccaccccttcctgtttgaaaacctttcagaatggagaagcattgagtttcagttctgtgtctaagcaatggagaaacagttacacctgcaagtcaagctctggactcaaacaaacataatgacagcctctgggctcagcagttggttccccaaaacagtcatctgaagaaaagattcaaatacctctgagtgtttgcgggtgtgtgtgcagtcatgtgagtgcacagacatgcacacgggaaggcagacatgcacgtatgcacagtgtgtacacagtcatgcacacctgtaggcgtgggtgtgtgcagagagtcatgcacacaggaatgcaggcaggggtacacaggtgtgtgtgtacatgtgtgtgcacaggtgtgcacacagaaatgtaggcatgtgttcatgtctcatgtgtgtatgcatgcacagaaatgtccaattcatatgccacagcccacttttttgcagcctccttttttacttcctcatactatacagcttcataccttgtttacaacttcccattattcatatacctatcaccaagttgtgccctcttcgtgcgtaactaattgagttcgtgggaggctgttgctgggggtccggcaattacagcacagtggcgggtgttggaagccaggggagctgaggctaggcagcatggctggggctggggcacggctgtcctacacgccacatgggctgtgcacatggaggctccttgttggcaccttggaaagccttagggtccatttctctacctggagaagcagtcactgccccttggtgtgtgcatgggggacagagccagggagcgtctcccttgctccctttctgagttctgagctccaggctccctgcataaccatcttaacagaaagaggagtggcgagcctgtctgctctcataaaccatgtgcccctgcaaacccccaagccagggctaagggaaaaacaatttgcagccggtggctcctaatagatggaaataactctatccgtgaatgcaggtgatgcgctaatgtgaaaagagatgaaaagtggaattcatttggaaaattttggctttggcccccaaggctggggcaagagggtgtcctccatggctggccccctccccggccccctcccagcctccctgtgagctgggggcagcctggcccaacctgtcacctggcattagaggcgataaaagccatgtgcttccctcacctcgtggtgcagctcgtgtttagggcctttgctttatcagtttttatttcgtgtaatattcatcacactggtttatttatggggcccttgttgggaagttatttttcaggcctggtgaataaaacattagactttgcggcttgtcagggtgactgcggctactctgatgtcagcctgacaaaccgccttttctttttcccaacaactgcacttttagagaaatttatttgtattttgttgggcatttgttgtttttttctccttttggctggtggatgttggtcagagtcgaagtctctctctctcgtctgattaaatgctggagccttcacttgctgagaaaggcaatatgttaagcaggagaagtgaggtgagcacctcgggcctccagaacctaagtcctgggctacaggagagccatgggatcccaaagcctgcaatgaatcccctccctgcaaagcctagcggctcaacctgggtgttcacagccagtgagcgaagtgctttagccgtgcaggtcagagtcgaaggatgacctggaggaactgctggagaggttgatggggctttgtgcggaaaggcagagggcacaggagtgtgggtcctaaaatcctaatgagaataatgggggaaaatcccaataaattaaaaacaaaacaggcgaaatgtggctttaagcaaagctctcaataagaaaatctgcacttaaggaaaactagggtgaagagactcactttacaacggggcttgtcacagtatttctcagttattctcatgcacttaaaatgtggattactttacatgacttttcaagttttgttaaacaagagaaagagaacacagtggggggagagagaaagagaaagagaaagagcgagagagagagagagagagagagaaacctggtaatgctatatttcagattgaagagtgttgagtttttctttctttctccccagaaatcaaaaggattaagaaaaccccaatcaataacaatccagccagctgctggtgattcactgtgacttgtcctttagatggcttagtacatgacgatctcttcattaagtgatacctggactgtgttcatccttactaatagctcataagctcagtggcttttttaaaactggaggaagggccaggcgaggtaactcacacctgtaatcccagcactttgggaggcctaggagggtggatcacctgaggtcaggagtttgagaccaacgtgatgaaaccccatctctgctaaaaatacaaaaattagccaggtgtggtggtgcacacctgtagtcccagctactcgggaagctgaggcatgagaattgcttgaatttgggagatcgaggttgcagtgagccgagattgcaccactgcactccagcctgggagacagagtgagactcggtctcaaaagaaaaaacaaacaaacaaacaaaaaaacccaaaaacactggaggaagaaaatgtcatttagcttcttgagcaacaccaccaccagaccaagggcatcagcttcccttcttggattctcccgtggatcaggtgtcacctgggatggctgcacactgacccctagtaacagaggctaccatttgtggggtatgtactgtcagccaggcagtgaagaaaagggtgccatcattcatcttccttcatcattcatgagacaggtcctgtcagcccatcttacaggtgaggaagctgaactcagaggtggaagaacagcccaaagtcactcagaggaatcacggggcaggaattggacacagcctgcccgtatctaagctcttacatgaatctccctgcccacaggtcggctgcatgcacaggaccatggaattagacccccatactctccagagagatcccactcaagtgggtatgagagatgccaggaagatgccactgatccattagtgtctgtgacaaggacaaacacttatataaaccacatcaaatctccaagaggggttagtgtgggctacatgcacccctgtcagaggtgtaggcaaatgggatggatgatttgagaatcaggatgctcatacacagctagggttctatgtcccgggtcctgaggccaacatcttttcctccagactttaaggagtcaagacctaaagtaaaaaatgcaaatatatcttccaaaaaaattccttgatttgggggaaattttaactggctaatttgagttggcataaatgaaaaaattccagactgccagtgagtacatccttggaaggctctaccattcccgagagctttcaaacaacctccggcgattctacaagcaccaataaaaacaaggactatgcatctctcccaacagccaccccctaccagagctgctgccctctccctctatccccttcctcattgggcttctcaatcattttcctgcagaggatggattcatgttgtcactttgtttgattatttatttatttatttatttatttatttagaagacggagtctcactccattgcccaggctggagtgcggtggcacaatcttggctcactgcaacttccacctcccaagttcaagcgattcttgtgcctcagccccccaagtacctgggattacaggtgcatgccaccatgcctggctaatttttggatttttagtagaggtgaagttttcaccatgttggccaggctggtctcaaactcctgatctcaggtgatccacccacttcagcctcccaaagtgctgggattacaggcatgagccaccacgcccggccatctgtttgcttttcaacccaccccaatctgcctctgtccacaccacttcatcaaaactctcttatcaaggtcacatttgaccctctgactgcaaaactcagaggatgaagtcacttgcctgtcctcagaccatacttgaccactcctaccttccttctggaaacaagtttttctttggttttgtgacactaaactgctgactgttctctgcctgtagggctgattattctctgttgtttttgctgaactctaaatgctggagttcttcagaggacaattctaactgtcttcttcaacagcagtgttcctgagagcttctcttctccacctgtttgttttggtttgttttgtttgaagaattgatccattttacctaaattgtgacatttacgtgcatagagttgcctgtagtattcccttattatccttctaatggctgcagggtctgtagtgatgtcccctgcttcattactgagattggtaatttgtcttttgtttatccttgttggtcttgctagatagaagtttatcagttttattgctctgttcataaagggattgaaccaatttatgctgtccttcttatgaataagaagcctgatgatcattatattttctgaaacttggatttgtcaggctttgaaagtcttgccaatcaaatggaagttaaacgctactcattgtggtctagatttgcatttcccagctgattagtgaggttaaacatctctttttatgtttattgattatatattctcttctgtatgaaattcctgcctgtcctctgcttttttctcttttgggatgttttatacttttcttcttgattttcagttatttaaacatttttgatactaatcttttgtcagttgtgtgtattgccaatattttcttctagtcttttcacttcttaaagacttcactttttctaaaccattcaatatattgaattaaaaagcacttattttttcttaactttaatgtactcaagtctgtcaatctttttttatactcatttgatgtgtcttgtttaagacattttcctctatgagatttgttttttgtttgtttgtttgttttgtttttttgagatggagtctttcacccaggctggaatgcagtggtgtgatcttggctcactgcaatctgcacctcccgggttcaagcaattctcctgccttagcctcccaagtagctgggattacaagcacacaccaccatacctggctaattttttgcatttttagtagagatgagggttccatcatgttggccaggctggtctcgaactcctgacctcaggtgatccacccacctcagcctcccaaagtgctaggattacaggtgtgagccaccatgcctggcctcctctaagagatttttgacatttaactacttcatccacctatgtccattttcaaaatatggtgtgaggtagagatctaatagtgtactttgtatatgggtaactacacaatttttttttccagctcactttgttaaacatccctgccttttgccagtgatttgaaatgctacctctaacataaccaaagttacataagttcatggatctgtttctgggaatcctgggaattgattaattggttgatccttatgacaacactaggtaatcttaattaccatagcttcacaatgagcccagatatgcgataggagaagtatctccttcatgctctgctcctcagaggggttctggctaatttttggtgtcttaatcttctatatcgtcatttgatgaggctccaattgggaattaatcagaattgcattggctgtagtcaatatagatcaacatggggaaaatgacattttaatgatataaaaacttcctattcatttattagaactcctctacttacacttcataaagttgtacattttgcctgtataagtcttaagcattttaaaattaaattaaaattaaatttattcctaggtatttgacattttctgatactactaaaaacaatgtcttctatttgtgtgtgtttgctgctggtatgtagataaaaactgagttaaacttatgccagataacttgctatactctccagtttctaaaagattttgtgtagatttgggcaagggttctatgtaaatgatcatatcatctgaaaataatacaattttttgttctttccaatccttacacatctagcttctttttctctctttgttgcactgcataggagaatggaagttttactagctttcacatctgaatgacaatttggctgcatgtaaaagtctatgttctatgttcttttattctgtgctttgaatatatcactccattgtcttcctgcatctggcatagctgttgaaaatcctgaagtctgtataataacttgctctttgtgtgtgatctcttcctgtctggaaacattaagaactttatctttgttattcttaaatttcactgtaagtgtataggttttgtttccctcttatctcttctttttgggactccaagacctcttcaacctgggctctttcatcctttttctttaaatcccattgattttatctccacattttcttcatatatgtcctcttctatatttttatttttctctctttgtaggacttctatgatccacatgttaacaacttaacattagcaccttaacttctttcctccttgtgttagaacttttctattttctttttctttgtgcttttccttatttttttcttggctgatacatcaagctggtcctccaattcacaaatgcattcctcagttatttattctagtacttttctcctgtatcgcattatttccacagctataccttaacaccaacaatttctactcggttcctttgtatatcttcttgatcttatttcacattgctaatatgtcccttatctcatttaggaggtttattaagcttatttttaaaattggtccctctgttctggtatttctattctgatagaatctggaagctgtaactcagtttgttgccttaaaaaaaatgcttgtgcttctcgaataccttgttattttgcctgccagctcattccctccagtggaagtctgctactctgccctgccctgtctgagaggtgggtagcccagtaagcctgagtgatctcagagagcggtgggtgaatgtactccaagtggagaggctccaaaaaatcacagtcaaccccatccactccaccaaattcctccttagatcagagcttcaccttccccctcctgagagatgcggcattcagagggacctccccaagcctgaaatagtgcagtctcctggtcgtctgcagaaaagcggggaagtgactgctggggtcaggtgggctgcacctgttttgcttggctccctgtgagcacaggtccctctgctgctgtgctgtattaacacctgcacctgagccctgcatagccacaggtatagacaggcatggtttgtcccaaggcaatagtggctggagctgggctaagtaagaacagacatcaaacattccccttcacgcttattctcccatagctgtgtttggcccacccctgctccaggccaaagccatagccccatgcacaatgatttgaaacccctcaccccctccatctgctgtctcattggtttcactctattcttcccctaggggtgagtttggagcaaggagctagtggtcttgctggttaccatcagaacaaacccaatttcttttcttttccttttttttttttttttttttttttttgagacagagtttcactctttttaaacaggctggagtgcagtagtgccatctcggctcactgcaacctccgcctcctgggttcaagtgattctcctgcctcagcttctcaagtagctgggcttacaggtatgccccaccatgcccggctaattttgtatttttagtagggacggggtttcaccatgttggccaggttggtctccaactcctgacctcaggtgatccacctcggcctcccaaagtgctggtattacagacatgagccaccacccccggcctaaacccactttttcaatcataatgtgtccaagcagatctcccgacatctccactctccgagaaaccctgctcttccctctgcatccttcatgtgggtaaacaatccctccaggcaccttattagctacatcccctctgaaagccagctgtgcctctatctctccctcttcccacaaattcaactcactgccaagtccagtaagttctgtctccaaaatgtacccatttcttggctccttccccatccccacgcctggcgctccatcatctcctgccccaaccatgcaagtttcctgcttggagtccctgcttcaccctcaccgagcagccagacctatccctgctcagcccctgcacgtgccttccactgagctgtgggctgcggggccaggcacagtcctgcctgcaccctctcctcccacctctcaccactcgcactcctctgcccactcagccacacagccttgctgggtctggggtcactctcatttgctgagatcctgcctcccgggggccactgctattgctcctgcttctgtctgtcacctctcactctcctcctcacttctcccaccttctcctccttctcccaactcctactcaccctcccggtccctattgaaattctgcttctcagagaacccccagacctcccattgaagcaccccaggatgccttgagcatttccctgaccatggtgaccactctttcatgtttccactggtttgtgcgactccagtctgatgtctggtgatcccaccaggcccggcaatgcctgaagatgacgtccctgcttatttcctttccccctgtatccccggggctcagcccagccctggaataccgtcacagctcaacaaagatgcgtcatgtagcttggtgcaccgagagatgccatcagtggtggatccccagcagggccttgcctcctagggaagccgaggtaggcacagccgtgatcaccaggacggaatgggttccctgagccccccggggcaggcacggccatgatcaccaggacagaatgggttccctgagcctaggccacgtggcccacacccacagttgggtgccctctgctccaggaggagaggctccagaaaatcacagtccacatcgtccatgccaccaaagtcgtccttaggtcattcagatctgctcatccctcgcagatccattcccgccccacctgtgtagagagaatcagacactcaagccagccaatggtggctcaggcatggggaggagagcgcccaggatgccccctgtccgtggcattgtccaacagctctgtcctccctggctgcagctgccctggcagcccctcctgacaggcagttctgacagtggccggctctgcgccccatcccgcctctccagtcctaggggcttctgtctgctgctgtccttcctcctctgatggtcctgtttaattctccaactcttccctggtcagtgtaactgattcttggtattaaatgctctctctgaaactcccagatgggtctcccttctcctggggggaccctgactgatacatcctgtgactataggttcttagagtaaaaggcaatttcatttcatttcatagttatggattgatagggtgaccaatgaatcctggtttgtctaggattatcctgattttagcagtgaaagtctacatcccagaaactccttagtcctgggcaagtccagccatgctggccctggggacttcatggaaggcaggcatggctgtgacccctgccccaccatgcctctgtccctgagaaagcaagaatgaccacggctcacatgccagccggtgtgtccctgtgacctggtgctctgcagggaagatgcaccatcctgtgagagcccctgatgagggttgtggcagacagggctcaggcagggcggcctgcagggtggcgtgagctggcatgaattgcggggaaagaaggtctctctgagctcaggcgcccccatggcgactctcccaccttccagtgccctggctgtcacctcatttttttctttctctaactccccttcccaccttttcccctccctggcatcccctggtaacctctaatccactttctttctctctgaatctgccttctctagggaccttatgcacgatgaatggttcagtatttgcccctgtgcatctggctgtttcacccgacgtaatgttttcaaggttcctctgtgctgtagcatgtgccagaatttccttccttttaccaggctatgtaatattcatggatagaccacattttgtgtatctgttcatccatcgacagacacttgctttgcttctacgctttggctgctgtgaacgatgctgctatgaacaccagcacaagagtctctgagtcgctgtgttcaattctctgggggcatgttccttgaagtggaagtgctgggccacagggtagggctctgtatagctttttgagacactgtcaaactgtttttccaaagcagccacatgctttacattcctatctgcaaggagcaagggtcccagtttctaaccatccttgcccattcttgctttttttaagatggagtctcactgtgtcacccaggctggagtgcagtggctcactgcagcctccacctcccagcttcaatcttgctgtcttttctattgcagacatcttactgtgtgccaggtggagtcttgttgagggtctgatttgcatttccttggtgacgatgatgtggagcatcttctcatgtgcctgttggccatttgtatgtctgctttggagaaatgtgtagtaagtcctttgcctatttttaaaagtgagccatttgccttcttggtgttgagttgtagttcctgatgtatcctgggttttaaactctcatctgagatatgatgtgcaaatatcttctcccatctgttggttgcttttccactttctcgatagtgtcctctgatacctcaggttttaattttgaggaagtacaatttttcttttgttgcctgtgcttttggagtcctaccctcacccttgttttaaggcctccttgacatttgttttcctagagagtcgttcagggcctacaggtccctgtgggaaatcaggatgggaggggatcttagaggcctgtgaaccccggcttctactgagaggagaagcttctgcattcctggtggagcaagcatatccaccagaaccactagaaccagccccatcagcacccacctccttctgtgtcctgccttttcctcctttcaagggaagttgttatggtttggctctgtgtccccacccaaatctcatgttgaattgtgatcccaactgttggacatggggcctggtggaaggtgattggatcatgggggtggtttttaatgtttcagcaccaaccccctagtgctatctcatgagtgagttctcatgatatctggttgtttaaaagtgtgtagcactgccctctttgatctctctcctgccaccatgtgaagatgtgcctgcttcctctttgtcttctgccatgattgtaagtttctgaggcctccccagccatgcttcctgtgcagcctgcagaactgtgagccaattaaatctcttttctttataaactactcagcctcggttctttatggcagtgcgagaacagatgaaaacagaagtgccctgagggaatgcatggtctccaagtgccttccattcactggccaggcaccgctgtctcagatcacatccccaacttacctcttaaatgttccctctggaaaggtaaaaactccatgatgtcagagtccactctggtttactggtgtggcccacacctcctagggttcccttacatccacagtgagtgaagaaaggcaaagaatggtgcacaatgaggcatgggtggcaaagagcctgctgccccccagaaatgacctcacagtgtcaggtcacctaggggaccacctggtggggctcagcctcacaggctctgcagccccaccctgtctgcactgggaatgggtcctcctgctgggcactggggccacatcagttctactcattgacattgactggcacactccagcgagcactgccagagcctcccttttgggcagacagatgggaaagtttgctcatcaacacaaaggcgcttggagcatccacctggaacaggagtgaggatcacacagggactgcctcgggacatcaggatgacatggtctgacctgatgtatctgctgcacaggagggacatcgtcccttgacaataaaactatgagcctgcgttggcctggacgatcatgccctgaacaacctcgccctgaacagcacatcagggagctgctcaccagggcctctgcggctgctgtggacactggtgcgcaagtgtgtgtttgagtccctgctgaagtctccttcatcccagggtggctgggagcactgccctcccatcctctcctccatggggtgggatcttcccttcccctgagatctgtcaatgactctggccagctccgtggactctcctgtgagtgggagcacacttgcatgctcctcctcctccctgccactcactaggtgcccaacctgggtgatgagcaagctttgtttgtttgagcaaaaagagactcatctaacaatcttagcttacagaatttctgggaaatccaatatagcagctaagatgccactatataagaagcaatactgcccggagaaatacccatcactcatgcagatgctgcagtgaagctgcagaccaaacaccaaacctccaggaaatcactgcaaggaaaagccacgtgattctgcacgtggcctctccagaaagctgcgtgtcttctggggcctggagctcacatgacctcctcggtctcagccagtcgcgtttgtgcaccaccgaggcttagccaggtgtctggctgaaggtggagatcaagcagagtgctcctgaggcacgaggggcccccactggctttctcacccttccccaggcgaaccttgcactgtcctgtcctgcagatgaggtgtgcagtgggggccgctccctgaggtcccacccccgcgttacccacttgaccatcgacctccaagtcctctgcatctctctcaggagatcttccctttcaccacccgactcttatttttgtttttaatagccttaatgtttttagagaagttttacactcatagtgggatggatgggaaggtacagagagttcccacagaccccctgccctccccatgacatgcacagtcccccactgtccacaaccgcctccagagggtccatcagttcaatgggtgaactatacggacaacgtcattgtcacccagagtccagggctcacaggaggattagctgtcagtgtggtgatcctgtgggtttgggcaaatgtgtaaagacgcaggcccaccattctagtgtcatgcatggcggtgtcaccgccctaaagagcctctgtaggcactggggccacatcagttctactcattgacaatgactggctcactccagctagcactgccggagcctccctctcaggcagactgatggggaaatttgctcatcaacacaaaggcactgggagcatctgcctggagcaggagagtgaggacaccccagcccccggcatctacagatactctcagtggttccatagttcagccctttcagtcttggcgttttcaacatttttctcagaactaaccccgggacagacttcacttccaccacggggagaaaccagcgtggaaggcagtaggaagatgacagggactgaggcgtggaacagactgcgcgttcagcgcaagccaggttcctgctgcctctggtgcagctgtggggggagaggagccctcaggagggtttcccttcccagatgtgtgagagactcaggcacagggacctcacctccaactccggcccctcagagaggggttaatttccatatttcacgattaatcattattataactatttttagttccacaagacaaggtagtttaacacgctgtgcatttttgcaaggtatccttgatccttctaaagtaaaattaaaagctataattagctcccttaatagagaattgcacttggttcggcgtcagctaacagcgggctcccttccctggctgtgggattattaatgggtgttattttgctaatagtccgcccctctaatggggactcttcccaccggcctctcctctttatagccccacacgggatcattctgactctcggattccactttctcacctacttccaagaggtttaaaacatgaccgtgtaatcaacttaacacatttaacatttaacacggggttcggcacttgtggggtcgggggtccctgttcagagctgactctccctaagaagaaagttcttccgaggaaaggcatcaaggctttggctctgaacaagcatgtgaagcctgcagaacgtatcgagggctctggggagacgtgttgtttgcagagcaggctgacttctgttttcagccactggggcacaactccattgactttgccaggcaagcatttcctctctgcgtgggatacccgcccccgtttccaatgcttgtacccaagccaagtggccccgggcgatggtggcagaggcagctcccctccagcctctccaggtcctgctgcctgggaagccacctgctcctgaacccctgagttcaacgcatgttagaaactaaaagctgaatataccccaagcctgtgaattaattgcttttttttttttccgaaacggagtcttgctctgttgcccaggctggagtacagtggtttgatctcagctcactgcaacctccacctcccaggttcaagcaattctcctgcctcagccttcctagtagctgggataacaggctcacaccatcatgctcagctaatgttttaatttttagtagagatgggatttcaccatgttggccaggctggtcttgaactcctgacctcaggtgatctacctgccttagcttcccaaagtgctagaattacagacgtgaaccaccgtgcctggccgaactgctttttagaaattatgtttcttgtaagtgcaaggaaaattccagctctgctaaatgtttgacatccttatgtaatatgtgacttaggtaatttccatagtctgacatctggctcactcctaactccaaatatcactgcgtctgtataaactctttcccctctcctgaattagagcatgaatgtggggatgtgctttggggcgttcaccccaactgaagtctaagctcaagtgttcttggctcttgacttttggcaagaacttgagctgacgtcggtcctgcctgctgcctgaatgttcctgcttgtgaaacttggagaggcatgttctcccaggagcaggacatacttgcagaccctcctgcagacggggtgggggagagaggaggcacttgatcccacctgggcaatgccaaggtacctctgccgtgaggcacgtactttttcacttttaaaacagggaagttttttttttttttttttttttttttttttttttttttgaggaggagtctcactctgtcacccaggctagagtgctgtggcacaatcttggcttactgcaagctccacctcccaggttcaagcgattctcctgcctcagcctcccaggtagctgggattacaggtgcctgacaccatgtccagctaatttttgtatttttattagaggcagggtttcaccatgttggccaggctggtcttgaactcctgacctcaggtgacccacccaccttggcctcccaaagtgctaggattacaggcatgagccactgtgcccagccagttttgatttttttttttatgccatcagagaaggacataatttagtgataggtgtgaataactatttgggaaataatttctttcctaaaatatgtccagagagagaccaaaggtaagaatttgttgggaagaatcatgaaaagtcagttttcaccttgcagttacaaaggtgtcaaaagtgcagccgggcctgcctgggccagccactgcccctgctgcaactccgtccccctcagccagctcctgtcgggctgagcctcccagtggcactgagatgggacacttggctacccacctcttgcttgagaagctatgtcctaaagtgtccccctgagcactcacaacagagactcggcagtgacaactggggagccggtgccctccatgtggcattcctgctctgtcctagccccacgggggccccagacacgcccacacccgctggtgacaaactcggcctccccgggtgctgtggctgctgctcttgcacacacatcctaaaacgcaaacacaagcaggctgtacgcacatgtagagtgtctgtgcttgcacatgagcacactcgcctttaagcagaaagagcgccacttgtaagctgcccaaaaacgaaacaaaacaaacactagccaggagcaaaagtaaagcttcattccaatgtttaaaaaactctgaaagaggctgggagctgtggttcacgcctgtaatcccagtactttgggaggccaaggcaggtgaatcacctgaggtcaggagcttgagacttgcctggtcaacatggtgaaaccctgtctctattaaaaatataaaaaaaattagctgggtgtggtggcgcacgcctgtagtcccagctacttgggaggctgaggcaggaggatcacttgaacccaggaggtggaggttgcagtgagccgagattgcaccactgcactccagcctgggcgacagagcaaaactctgtctcaaaacaaacaaacaaacaaaaaacaaactctgaaagacgacttcactcctcatgctaaatgaaaaggcaagagtttaaagcgcaggggggcggtataggggggtggtgaagaatgaagtgcgtttgttgaatttgtaaaaagacagagaaatattttgttacctcaagggtgttttttttttatttactgctttccaagtcaatacaaatgtttaccaattaagttcatttttttaaaaaatcagtaaattgaagttttttttttactttagtatttaagtaacttccacttaccagatcccaaacaagctattattattattattatatattattattattgacagcatcttgctctgtcactggagtacagtggcacattcatagctcatcataaccctgggctcctgggctcaagcaaccctcctgtctcagcctcccaagtggctgggaccacaggcacacaccaccagcctagctaatttttatattttttgtagagacagggtccacctatgttgcccaagctggtctcaaacacctggattcaagagatcctcctgccttggcctcccaaagtgctgggattacaggtgtgaccagtgtgcctggccccaaagaagctatttttcatccctctgggacctaacaacaggcacaagggggaaggtagtgagctagagccgtcttcccctccccagcactggcgaggatgctcacgccgtggggagaccccaccatcggcacactgccctcccttctgactcaggcaaaatcccacctcctccatgaaacccctcaagtctacacttcctctcatttttcttttctttctttttctcttttttgaaatggagttctgccctgtcactcaggctggagtgcagtggcatgatctcggcttgctgcaacctctacctcccgggttcaagcaattccattgcctcagtcaacctagtagctgggattacaggtgtgcaccatcacgcctggctaatttttgtatttttagtagagaaggggtttcaccatgttggccaggctggtctcgaactcctgacctcaggtgatctgcctgtcttggcctcccaaagtgctgggattacaggtgtgagcctccgtgctcggcctggttctctctcttttctgagttatagtcacaggcagtgtttccaacacagggtgtggccattccatttcgccatcaggatccctgggtttctcatgtgtatcagctctaccttcctgccaattgctcgagagccacttgggaaccagaacaaagtatccttccctcttttcccaagtgcccccagagggctcgcgcagagcagacaccacgagtggcacagggaagctgccccctgccccacacccagcccagggaggcacagagcactggaaacttccatgggtgggtttgcaccaggccaggtgtatccatcaacacatcctgtaatcctctctacaactgtattttatgagtgaggaagtaagattcaaatgggttagacggatttaaacgtatccctaatccacctcttaatgaccccacaggctcagggcaagagctgaggggcttggctgactgcagcgcctaccccgcccctccccagggctgccagtgttagcaaagaaaaatacaggatatgcagcttaatttgagtttcagataaacaacaaataatttgtagtactagtctatctcaaatatggcatggaacatatttacactaaacactattcattgttaatctgaaattcagatttaactgagcagcctttattttatctagcaagctactctccacatcctcccccacaaattccaaagagcatattttgctgaaggtgaggcatagccttcgaaggaagggcacggcacctgcctccccgctggctcctaatctctgcacccagacaggccaatcacatttgaacaatttagcagacactccttggaagagaagagaaaatcacccacctctccaccccgactaaggcaggaccataggatggggctccagggagggctggctctgcaggggcctcttggtggctctgccaggtttgactatctcctgcacttcgtaatttgggtcattttttttttttgagatagggtctcactctgttgctcagggtggagtgcagtggtgatcaaagctcactacagcctcaaactcttgggctcaagtgatcctcccacctcagcctcctgagcagcaaggactacaggtgcacgccaccatgcctggttaatttttgtattatttgtagacagggggtctggctctgttgcccaggctgatctcgaactccagggctcaagcaatactcctgccttggcctctcaaagtgctggaattacaggcgtgagctcccatgcccggcctaggtcattgatgtttctttattttttttttcatgttggtattcagtgtccttatgactgggtgtttgccttttctctttccgacctccatgcaccttaacttcatgaaacatagcaagcatgctgtgctcatgaaacaaaaatacttcatggtactggaggtttttaggggtgtggccagctagcccagcttcccacccttacaacgatatcgatatctgaagcaaccaacaaaagcaaagcgagggtgcagcagtgagcttggaaacagagagcctggcccatcagcctgggcctgcagggaaccaaggaacctgcagggaaccctgcacccagctgggcacgctcatcagactgcaatcccgccaacaggtgccactggaagctgctcaccagccccgccaagcgccgcaccctggggcccccacccgtcagcttctgcaaaggtgcccgcgctcagcagggacgtgaacagttttcttgacactccatcctcattgaagtgaaatccacgcagccagcatcggagacgatgaaatgggacaagctctcaccgctgcccgtggagggatacctggctgggactcaaaacccctattacaaaaatcagaccattaaaaaaaactagccaggaagaagccaggagatttccctccgccatctgttaatttatagggttatcggtgtcagcaatttaggagaagttaaattatatcacagccccactcacaactctgccatggaaactcagaaatgtaatcacaaattttaattgagaaaaattgctctggatcaaattccttttttttttttttttaagaaacagattaaattatgttgggggaaggggagtggcaatatgagtttgaaattagttgtgataaaattgaggtgtgattgtaaaccaatttgtgttttgtgtattgtgagtaattgttgggagagagaagcctgtccgggttatttctgctgaatgccgcaccgtgcctgggaagaacatcagcttttggaaacagaagttcacgtctcaggcaaaggaagggaaaggaataaatggccgaacccctcctaagtcaagaaagacacacatttggctccaaaggtttgaaagagggtgacagacagctgtcaccctccctctgctaacatcaggctgttccccagacccacccatctgcagacaatttctcctggaccaatcccatcctcggcttgccactgcccgacctggcctcttccctctccccaggctgctggttggcgccttgatccatttgccatcggggctatctgagacgctcatcgaggtgcttacccgctaacagctctgtgcaggtggcatgagcttgcatcccccactgccttccttgtggaaagattaaacatctctcagatgctgggaggaccctcacggtggcccttggttactggagtcaccaggacctgcagcaccttgccaacaccctggccaccacctcctgcccctgagcccgcgtggctctctgtgccacagctggagagggcccagctgatcagcagctctgccaggcactgtccagggcttccctaagggacatgccagcccacgtccatctctcctcctcctcccagcatcccctctctttcactctgccctcaaacagcatttcactccatcattcatttcttggtctttgggccaaggtcatgtgtgtgtgcacacgtgtgtgcgctgtgcaggggtacccagtgtaactgcctgcacttatttatttagagaagcagaggaagtggaggtgttgccagttcttgccatttcatcttgatttagtcatttttatatggctcacaaggcataggcagatttctctgtttctttatttgttcattaaaacttcaataaaaatgttataaaaatgtcttattttggtagttaattgccatttccattttaatatgcaagcggtgttggctcttctccgagattcttcgagtctctctgtaaataatacagctgccttggacgaatgttccctgcctgctgcgtatttactcagtcatcaaagcgcaaatgtggtgggtaacagatcactcccttcgagagaatccactccactgccagctcacacacagccctccacgggccacggccaagcgctgagccaacagagtttgcctcctgcctcacaccggggtctttcagcctgaggtgagcgccccagagagcttcccaggttctcagatattttcctgcctttgggaaaatgcatctgtctccctgcgtttctctgaagccagaatcccggcccttcagggcttggctgagatccccggccagcgtctgcgtaggacggtgggagaggctgagtgcagcgtctttcagagccaaacagagccccagctctgaggcatggggagaggatcacccaggggaccagggggtgggggtggcggtgggcgtggaaggccacctgcgctgggcctggatggcactaggctgaggggagcagggggagcagtgtcagcaggggcctggctgtggcttgggatggagatgggagcctttatgtcccgcgtgtgaggggcccagaggcctctttgcaaagcttgaatacctggcgccccaggaaaatgagagccggcctgccgggcaattgcttcctgtgacggagccagttactggcacctcatctccactggctctgagctgcacaggctcattagagaccatgggatggggcctccgaggagctctgggactgctcaaggccaccagagctggaatttgttgccacagctatgagagaggggtaaagcgggaacatcagacaaccctgaacgcccggctctgtgtgcagacctcattctcggacacttcgaggccacacaggtgtgagaggtcccactccccaatctatatccccaaatgctggtgatgtcctgtcctgagtccaggacccctctagggttggagcggggtaagccccagaatatctcacaagccagagtaccttctccaagtgcagaaaacggagaattacgggaaagtaaaaattcagaggcatgacgcttgcacatgcgaggtttctgggccatagtgagccgcaggggaggcacgtggctcctgcaggggagatggaggggaggcacatgactcctgtgtctgaggtggctcctgcactcctgagcgtggccaggggttctgtagtgccagcaaggctgatgcacagagaggggacatggctcacgggtgacagttagggtcaatgtgcagaagaaccaggggactctttaaagggcaaatgcgctgtgaatggagactctcttggcaacgccagggagaggaacaggattcctgggatacccaggaagtctgtgggctgttccctctggaaatagggggctaaggtgttcccaggcctggtcacctccaccccagacttccaaactcttctgtctggctgcctcctcggctttttcaagaagcctcagaagtatctcagaagtatctcagatcttctgaggatgcccaacacaaggctcaattccccttcctgttcctgcccagcttccctggggggtctccgcgagcaacatacctcttacccaggggcccaatcgaagatctagggccttcgattccctcctttccttgatgccagtatccaggccaccagcaggtgtttcagggacctccgacacgcctccagagcccccaacacctccagagccctccagcctccatgctcagcccgtccgccccccagcagcctgggtctgactgaggaaggtcaatcagctcgcacccctgccccactcagaactctctggggctgtccactgcactgggataaagcagacgacgggctcctgcagcccctaactctccccacctcgtccccctcacccactccactccagccaccctggcctccagctcctccacaaatcacagcctgtgctccaccacgccctccttttccaccaggctttatggggctgtgccttctcaagcctcagctcagatgccaggtcctcagagaatccagccctacaggaaacagccaccagccacccaccccatggattttcgggacagcacgcaccactctgggaccattcactcagtcatttaaacagccccatgcccagaaggcaggctccgtgggaactggtgttcagccttcctctctgctccacctgcctgcccagagtaggtctggcacaaagtgagcagagatggtagccatcagttgacaggatcaccaaatcccaaatctccatttcctgttgttcctggcatgctgttttaggacagtcctgaactggacttgcagtctatagaagacacacgcttgggtgttccttgaatgacggggctgatggagataaagctgccattcagatgcaggtggactctgaactctgcgaggaaagagatgctctctgcagctggggacagtgctgctctcccaggccaagcacgtctcccaggcatctgatgggtcagtgcgcagttaatgagtgtgttgactgcacagacactgcgtgcagctctggggatgaaaagatgcgtaagacaaaggggccaggggttgaaggatgagggtgtgctggtgggtgacggggagcgggcgtgagcaggtcggatagcctgctgtttgctttctggtggggaagcacgctctccactgatgggggacaccatatggggctggggacctagaggaacacattatagcccatccagcacagcctccagggagaggaccccgcaaagccccaggatgactacccagcccacgcatgtggccttacctacagcctgggttgctccctcagctggagaggctaccttgtgtggccagaaccactcagtcaatgtgaggctgactcctggtgcccagggagtggctgggcaggagccacccagctgcagtgcttgggcagcagtcagcccaaggctcagaaaggcagcatccaagcaaagggcaggatgctccctgggccagtcttggacacattaactagagttggtgggggaggcttgtctcttggtatttattgggcccccaataaagcctctctaccctcaacactttagtttctgctctggatgtgcgcacacacacacacacacactctctcatgcacatgcacacggtatttctggggaaaatcttaactccttgctcttttcaactcctttaaaaaaatcactttggcttgttccagtttcatcctcctatgaacaaaatatccactccagcagaagtgggagggatgactgtaactgtggggaaaaaatagcatcccctttgatgttaagtaatacaacaaactcctaaatgaaaatccactaagagaaaatgaaatagaaagctgcctgggcatcaaaaattgcaaaatgaaactgttaaagaataaaactcattaaatgcctgtgataacactttattttaatagtacatttaattcatacttaattccaatgtgctctagcgcggccctggcgctcccacgcgaacaccagataaatggattacggcaagccaggagacaatgagtgcccactgaagccggcgcggcggcaggtgaaaaatgctttaacggaatatgtttcccatacatgaatcaccagcatatttgataacaccttccacagaaataaacctgaaggaatatatcttccccacactgacaatgtagattaaatagttttaccccatattctatggggacgctgctatctgatttagagctcacagaattcacaaggtaaagagggcaggggcaggcacctggcagggtcaaggggctatagtgtctgctgcccgagagggaagggggcttgccaagagcacagcggccacacctctgggtgcccggtaaccatggagatggcagcccttcttggataccacactcttgcaccaaagacgccatcagcgtcatgaccacgccacggatgtcctgccactgcacatttctgatctgaaaccaggagggcagcacacagggatgcttctgcccacaggggacacaccatgctgcagcctggagcccctgtgctgaaagtcaccttagggaaagcaagtagagcaagcttcaaaaccagcaagacagaggcatcaatcaacccggtcactaggaaagctagctgcatagctgacgagaagcaacccacgatcagcctgtggtccaagtcatgcccaggcaccgcactagtctttctggtagacgatcaggcatctcgggcaccatcactggtaaaggggctgctttctgtataaagaacagcagagcccagccagtgactccctgacctgttcatgcctgcagaccgtggctgtctctatactaagccgtttctttttctttaaagtgtttatttaattctaaaggaatgggtgggatctggcagctaacgcctgctctaaaagcgagctgtgattttatggtatattatgccggcgccacgtctcaatctatcaaagtcagtgtccccagagcctgagaaatcaaaacatcatgaatagagcaccacttcccagctcctgctgtctgccggcgagagagccagcccaacgagcagtgccttattgacccttccatcgtgcacagtcgatcccagccgcctcgccgccagcccagcatctgctcaactagaggaggatgaatgcagggccccagcccagcagaggcaatgtttgaggagctggaaggcttctgcctgtggacactggcaggactggggcacagcccagcaggacgacccttgtccttcctagcagatgttgtgctggcccacctggagccccttccggggagctgctctcaccccagctgctgggaccctgggcagctgaaggctctcagctgagtccctcccagagtactgtcctcagagagagccacctcgcccaagggccctggggagggtccacatccatgacaggtgggcaaaggggtacaaaggccatgccattttgcctcaaggtggggcagctccagagctacgcagaggtctgctgcaccgtgttgtgactgcctcacagcctcacacctcccttgcccaattctgctgccctcgctcccacatgagtgctgaccccaggcctgcatgtcaccttcgcagagtcggcttccggaggaccccagcctcagacaccctcctttccttcttctcttccttctcctcgaagtcctcctcctctccctcctcccctccccttctccctcctcccctcctccttttcttctttcatctcctcctcctccccctcctcctccctctcctcttcccccttcccctcctcttcttcatttcctcttcctccccctcctcctcctactcctcctccacatcctcccctccagtcctcctccacctcaagtcccccgaccttctcccactgcttgatccttcttcaaaacgcaaatcacattggccagattcatgcatgtatcacccagcagttagcgatgagcactcatgagctctgggctacaggtgtcaggagagaccgagacaagagaagacacacagtaagaagagtccgctttccctggttttaaggtttagattgcaaaagtcagatttactcccagccagtaacttgaaaatatttccccagccacctactacgggatgcagcagaggagaaaatggcactaccatccacccctccggggaggacaggcaaagggagccacggccagtgggtgtcatggtgggccggacaggcagctcttttggggggtctctgtggcagccaaggtatgtgacagaggaggaatcagagcccgcctggccccccaggaaggctgctcacctgaaggcagacactgtggacaatccaccgacaatcgttcactatgaatgggtttctcctgcctccgaatgtctgggacatcccggcatgactctgtgtgcattcagggctggggaattaacttcagccaaagacaaacaacaaccgagggtcagggacacctgaaattcttacaggagattctcagcacatggcaaggttagtcccaatgggatttgctttcatttcctgctaatgagattaagaggcgtggggacagaagttcctgtccacaccatcctttattacgcattggccctgtctttccttccacgggatcccacgggatgggttctcttacagaacaacttttcccctctccacagccgtgcccacgtcattctgcagaagggctgagccttatctaaagcaaagggagctgcaaagatgaggggtccagtaggagcagcagctgaggagagacctccccctccaccagcctggggctgtagccaggccacaccatccaggtgggggaccaggaagccaggatcctgcgtgctgtcctgcatctgggtttcccaatgtggcttcacaatgctatttgaactgtgttcatttccaaacctaggacgcccgcatttgcagatggacaaaaatgccacacttgggagtcagtcgtgggttccaccggttccccgcacctgctgccttggtctcagttcctctgcaggacaattgagaagcccgtgggtgggtgacctcatgttgccatgaaagacaccactccctggattgttaccatccgagaaggtgctggaagagctgaccagattccaagcagcaaccaacccagaggtcctcgcacaccagcccgatgctggtccgaggccccacgctcagcctccctccagccagacacacgggtgtccgggaggttgatcctcagccagggctgacaccattagggccatggaaatgtcatgatttcttttaaaatgagaagataaaatgaactttaagggccaacgatgcttttgtctttgtatccacactgtggcaaaatctacttttcactattttttgatggcaggagatggcccacacagggcccatgacaggatgcagccatgggcttcacgaaggcaggaaaaggcagatcccagtcactcgctcaccgccgcctgctatccagcccacggcccaccacacaaggagagcgaggaggggctccaaccacaccagctctgccacccctggacagcctgggggcatctgctctgagctgtctcactgcgcccagtgcagctggtgggcatccggtggcactgtgccactctccaagcacacgagcaacgggcaactctgggtggggaggggctgcccatcagccggggttgacctgtggcaccgggtgccaacaccatcttcccacctccccaggcacggcgccacctccacatctgtacccaaaggcaccggagtttctaccacagtctgcccccactccccggggaggggctgatgggggctcaccagaggggttgccctggaccctgaccgtgacccttgccgtgactgctgggggcaaaggacacgcgtttcggagggtttgctgttttcacccccagaactcaaatggccttagcaagacagggcttgtctggggatcccctcgaacaccaggcatacacaaggcgcctcctcccaggcctttcccttcctgccaccccaaactctgggtgtgtgttctggggcatggttggtgttgctctggttagcgttgaaagccgctcccctgccaccaccatcttggtcagttctgcccgcaatggccttgggagcccacgtgtgtctccaggtgattcttcactgctgttgcctcccctctccctagagggcctttcaggtcctgcagctcctggtgccaccccagctcaggctctctctgcagcctcgggaaagatcatctgcccgccctgatggatggagatttggtcaaacatctgagtgtctatcccctggccttgtccctcctgtcccctctttccctctcaaagaagctcccacggagagagaattccagctacgtcggtgcagagtggccttggctgagggtgagcactgggctgcaggtgcacatttctcctctaagccccaccagacgcccttcgttagatggagtttgggatcccaccaaagagaaggctcttggccagcaagggagttcacacctggggcctcgctggcttccagcccttcctgatgctccctgctctgtggtgaccaggtcttggtgccaaccccatcatcaccagagcacctctctcaccaggagccaacgctcacagagccaagaggaaagaagtcactgacagcacttggacgtcagaaaatcttccagatagattccccaaggaagcaaagctggagacaccactctgcccgggttgccacgtgtgcagccctcccattcccagcagggccagagccccacccagtgcctgagccccacccagggcctcacttgacacttgcagaatgcacttgctgccacctcaatgctgtggccaaggtggacacatccgaccatgctcacatgctcacatacacatgcacacaccctgatgtgcacagtcacatactaacatacactcacacacgtgctcactcacacaggcacacacacgtacacgtctctggtacaccctgaaatgcacacatacactaacatacatacatgtgtgctcactcacacaggcacacacacgtacacgtctctcatacaccctgacatgcacagtcacatacactaacatacatacatatgtgtgctcactcacacaggcacacacatgtacacatctctcatacaccctgaaatgcacggtcacatacactaacacatacgtgctcactaacacacacaggcctacgctcacatacacacgcacatgtctcatgcatacaccttgacttgcagtcacactcactcacacacaagctcactcacatatgcacacaggcacatgcacacacatgcttctctgggtccttagttcccagggccaagcaccttatctggagaaaccagtgcccccatgtggggccaagccaagaacacctggagctcccagcaggtgcttgtgactgggaaggcacctttcctctcctcccccggtagggggttagggagggaagggggacatgcacggcaggggacttggggaggcatgcacggtggggtggcttcccaggccagcacggtgtccctcctcctgtctgggtgtccctgggccacctgctctgcactggggcctgggacctccttctctgcctttcttcactgagggaccatggcgaggggccacagtggcggccctgttgcctccatggggcagattaaccccactttgctctgcctgggcacctgggtttggaaggttctggtacgttccactgtgaaatgggcacatccgaagggctgtgaatatcttgctgctttagaacaaatgaggaagctttgcccgtggccagattccagaggagcccagggcttccgtcttcctcagctgagtgcccatgctcgccctcccctttcctgctccctgtgggggcaagagctccctggctgcagagtggcccttgttgctgggctccatagaccccatgcagtctatcaggggctttggctcctgaaggcagagcactccttgctgctcctgacaccactctgtttaaagagaaaatcgagacgcccagagtgtccagcagtccctagggttaggggccactcgatgaggaaggtcccaccaaccaaatgtggtggggggacacgtgtcatctccaggacacccccagcagccctcacgctctttcctcttctcgaaaatgtggaaaccacgtgttaaagatggcagatcctgcaagtgggagggactggggcttggggtcacccttgggagcagagcctcgccctggtcagccgtgccctgagggacctggcatggtgagaagcgtgtctctgctgtgtcacgacactgagatggggagctggctgtccccgcagaaagcattgttcaattcataccaaaaccaggatcagaggatcgaggctcctaagcaggccaaggagaggtgcagagcaaccacagcccacaggcaggttcggggagaccctccccgcagacgcttcagttacaggcaggttcgaggagaccctcctcgcagacgcttcatttgggcctagcacggtgaatgcaccctctaaacgccagtaactgcgaggatgactgtggccacggcagccctcagcaatgcgctgcccggtgctgtgagggctccttccccaggaacagcctgccccggacagcactgcctgcccgcaggactctgtcagctggctccccagcctgtcctatggcctccccatactatccccggcaatcctatggctcccctgggtcctatagcccctctatactatagacccccccctgtcaaatcccccccatcctatgtctcctcccaggtcctacaggccccacctccccatcctgtggatccccctaagccctatgggctcccccatcctatggctctcctcagtcttatgaccccccagttttatgtctcccccctggacttatgggccagtccatggctccgcctctgtgtgatggatgctcccaaggccaggcctggcccgggctcccacccctgcgggtctttctccattctaaatcccccccagatccctgccaggatgaacagcctagctcagcccagtctcctggctggaggctctgggatgtcagctcccccatgtttcctggggacttcctccccacccacaggggcagggcagggacagacgtgtgagacacacctgattaacccttctcatgctccagaaaaaggggagtctgggcagggactgttgcccacctttgcgtgggcatcaggaggaaccagcatagaggtagagctgcgtgtccaactggccgcaggtgtgctgggggaagctgacagaaaacatgagtctgttcctgagatttttctggtgcaattgcgtgaaatgagtctataacgcagagcaagacagggcagaaggtgggcggggactggcaggagtcaggggctgataaggaacaagggccagcaattagagcccagcccagggtggatggggccggcccactggacttttatctcactcctcggaagaggaagctcacgtcgcctctcagcaggtggggcagaggcctggcctccaaagcttgcagagacaggggtgacggcaggggagcaggttgattccaaccccatttccatgtgttacaaatgcaccggactcccccagctgtggcccaggcctcaggtccatgaacccctccaagttcttccctctgtcctccccacccctacggcccccacacatacatactcaactccagctccttaagggcctagtcgacacctctccccacatttccatttggagaaaatgaagctcagagagggaagggggcttgccaaggacccagcccaaccctaccaggcactcgggctgggcgtgggagcatgtcacgtgctcagagcctctgatcatgaatggcagcaccagcctgaacccatcctggctccattcagaacacacctgaaatcctttctccaaagtgctctgtgaaatgggtcagaggggccagacgggtgcttacctgaacacacatctgagcatttcgcaaacactccatctgaggacttgacgcctgctggcctgaatctgtctcggtggttttacagcccacactggaggcccctggggtgccagcatcatttttatgtgtgagttccacacggctgctttctcctggacagagctccccctcaacccccgagcaggagccgggcctaccacctgcccagcaagtcacgggccaccctggaaggacacaacctccttcctccagggcaggctgagcgcagggaccagtttcctcccatctccctacggttttgtgatgagttttctttttttgtttttgtttttgttttgagactgagtctcactcttgtcgcccaggctggtgtgcagtggcgcgatctcggctcactgcaacttccgtctccagggttcaagcgattctcctgactcagcctcctgagtagctgggattacaggggcccacctaataattagcccagctaatttttggacttttagtagagacggggtttcgccatgttggccaggctggtctcgcactcctgacctcaggtgatccacctgcctcggcctcccaaagtgcggcgattacaggcgtgagccacctcgcctggctttgtgatgagttttctaagcacctggtgcagctgcttcctctacatggagcagattccagggagaggaggggctgacgaggagagtgggcgtgagagaagtaaagacgagaagccgcagcttcccagggcaagggaccaccatctcccagaggggtttccaggcgagggggctggtgtgtgggtggtggtgcgggggcaggctgctctgtgtccaggtagaacaaggctgagcctttcttctttggaaaggaccggctttccatgcagaaacaggatctgctaatagatgagaattaagaaaacccattaagctaatgagttgctgctgaagacttagggcagcaaataaaacctggaagggagggctttcaacatttgctttaatttaaattgaaccagactgatgagaaaatgcgagagctggctgcgcccaggtacacgcagcgaggttggcacacgcacggcacatgtgtacacgcttgaggctccgttcgcatgtttgcgggctttctccttgttttcacacgtgtaggtgtgcctggcttttaagaacactccatatcaaaacagataacttaaggaaagtgtttttgcctttagcaaaagggttattttctgggaaagatttctggcaagacttctttacagactgagcctcccccagtgcatttaaaatatgatttgattgaaagaaactctatttactctatttccaggcaacatccacagcccttgctcctctcagcccagtggcttccttcttcccagagccccaagctgcggctgcttccctctctccctcctgccccagccctacccacctcccttcccctgccgctccaccagcctaagggcaccactctcctcaccttgccagatcctggtcccctgggctcgccaagagccagcacaccaggtccctgccattgaatgacaccctgtgttcctacagtaatgtgacatccccgggagcaggaacacggtcctcctaaatcccgtcatttggtcaagacaagtttcctccaggagattccagagaagagtcagtgaaggaaaatcatttcccaggcagctggtcaacaagccttgattatggatcaacccacgctgcagagacttgtggaaggctggatgggtaaagaggggacagggccctccctctaagaagctgctggtccagttaggaagacagaagacacacacacacacacacacacacacacacacacacacacacgaagctcttcagtgctggggatgttgagggtgtgtatttggggagtgttgagggtaatcagggataacatactctcggcccccaggggaggccccagaagcagggtgacgtgctgggctctggggagggagcagcgttctgggagagctctctgccaccttgttgccatctcaactcagggtgggacacacaggtgtgcaaaaagtttctgggggctgagcagactcgggcaagtggctgcagtgatggaggtggggtgagaggggatggagttgcccccttggaggccataaggggcacaactctgatacccaattcaacctcactgccagcatgaaacccctcctttgaaaggggccgctgagcccagaggctgcaggacacggcccctcaccgtcaggtccatgacaaggtgagcctgcctgcttccgggtgcctgggttccaatcctggccctgccccacaccagctgtgtggcctcgggcaagttatttagcttctttgtgcttcagtttccttggctgtaaaacggggagtgcagttgtgcttccctcacagtgtggagcagggatttagtgagattctgtttgtagaatatgaagatccatttccagcacacagtgaaagcacaataaatgtagagacgattctcgtcctgatcatgcccagatgtggagtctgaatgccccagagcccagccgaccccctcccaggcagcatggtggccctgtgtcccccaagtcaacaccccctccttcctttctccagcagcccctgggcgaggagactgccttctccaggtttgtctctgtccactggtcccagggactcccagcctggaatcgactggttggaatgaaatgatttcctcccatttttggccccacttggaaaggagagagaaagtccggtctctgttcctgaagctgccttcccagtcatgggtcacaagcaaagaggaggtgtgggtggagagggaaggtgggggtggcaggggccggccaggcacccgcaggaccctctctctgcagatactggggagactggagctgccaacatgaagaaagctgggcctcaggtgggaacccccaccccaaaacacacacagccaagtgttcagctgaattctttttcaaaatattgtaagagaagtcatattccaccgtgagcaaattgactcaattaaattaccagggcatccccggcccagcccactgcgtgtttgctcagctctcaggagtgggagctgctgtcttgcagccagggccgcacgggggctggaggaagaggaggggtgcagattccaggtccagtgaccatgagttgaggaccttgttttcagcaggtggggaggctcgcagggggatgggggtgcttctttcacctgttcgcttttctgtctctccactgtggagacatcgtgagcacaaggacaatctggtttctcagggttccattttcacctccctggaaccccgagatgtgggaggttgggaagcccccattctcttctcccttgctcagtgccaccccagcctggagcccgacacctgccctcccgccagtacctcctgaggaccaaggctcgctgctccctccagcctgcttgcaggttgagtttgggggtgttccgtgttgttcttagagaaaccgcagtgggcaaaacaccctagaccaaaatacaaaatatccctccttctagagactccttttcctaattaggctacttctggggcatggctctggctttccactgcccagctggtcttgcatatttgtctagacacacagagcacacgtgtacacaaagatacacacacactacacagacgcacagagatgcagagacgtggaccacagatgcatacagacataattacacagagacgcatacagagccctgcatggacacgtgcacacggagacacaggcactcttacacacagacatgcacacccacttgtaaacggaaacacatccatgtggagacacacacactcatacacacacagacatgcacacccacctgtaaacagaaacacatgcacgtgggcatgcgcacgcacacacacacaccatgctcagcgacatcactccgagttggtgacatcctcctgacagctccatcgcacccatgctgtaggtgcggcggccgaggaactcccctttggtaggacgcagagctgcactcaggcggttccacggtgacagccggagcagggagccagaacggcattgtgtccacgggggaggggcatcgagcttctgagtgccagcattgtaatcaggggcttgggacaccgcttggggtcctttatttgcccctctgccctgcatccctttggaaactgcagaagcccacggctttctaggtgtgcgtgtccctggtgacccgaggtcgctgccctggtggagggcagcctggaaatgtgtgggcacttggctgcctgcgggactgggtcacctgagaattcccagcactctagagagggggcagggcatatctccgtcaggcccagggcccatacaaatactttcatttattttaaaaacagaataaacttttaggttagggaaagtgtcttaatataggataggaatatattcatttttataccaatgcagtcacaaactataatatttctttatggaggaagcggattgtgaaggcacaagtgcccggaccccgtgactcccaacacagcctctgagagcacatccatctcatagggggggcgcatcaggggtcccagcgggtctccaccgagcccagagccctggaaagcaccgagcctccccgtaggggcttagccctcatcaccactctggacacaaagaactgagcctctcccactggtcctagaagactcttctcctagaagagtccaagaggggctcagagaaagggacagagcagctgactccctttctggagcctggactagcttcatgagggggatcccactttagtaacacatgagttagacacaggcatgccccagaccataacttccatcccaagaacaggtagaggatatatttaaataatacgattgagagcattaaaaaatatcgcacttgcccaggtgtcggactcgctaggacataacccgtggccgcccttttgggattgtgttcacagaccccaggaagccaaggacagggttcggatgggtgggctgagcccgggacagaacctcccaggtgctggggctgtgtggggggcccggaaaaagaaacctcctctcgctctcctgctctgcactctcctgtcccccagcctcacctgggagccaggctgtgtcccatgttaatgcagctacttcacacaattaccccaagtttctccagtaggggctaatggataacatttgctaatcacagcacattgatctcagcctcgcccccggaaccctttccccactgaaaggctggcagggaacatggatcctgctctccacagccgcacagtgggtacaggggtggggagtctggtcaccggcacctgctatttgcctctgctccagccccagggcccagaggccccgtccaggctgcacaagcttcggaaagcgggtaggagcctgggttccgtgtcccagccctgggtctgactctggccatgcctcctggggagggggattctcaactggggaagctgtcacaggggcgatgtccatcccaagcctgatggacacgttccaccacctctgccactcccagccccatcctggcacaggagggcaaccgtcccatggcacgcgtcggggtgagccagccatgcgcttgcttatttgtggctgctcagctccacgcaaataagggtttgcctgtttcactcccagggctcaggatgggcccgcacattgtggggtcactgccagaattcccgactccttgcctgccctggggactcaggtctcggggatgacctcctacttccgagagctcacaaaatcctcctatgaatggaaaagtcgaagaaggggtgtgttctgattctaccccgttttcgttttgttttaaggtcctccctcgttcacctaagggagacacacacttgtctccatcttcacacctttctcaatgtcctggattttctacattaagcacggatggctgttttggtcaaacaccactatcattttaaccagagagaattacaccctggccttgaaagaatgaacacgggtgagcagggacctcggagactcagcctctcaggggccggcgttccaggcgggaagctggctccagggctacactgcgcttgtggtgagggccacacagctcagcccccgcaaatcccggatggactcatctgcgcccccgaagatggcttccctcacatccaattcccggtccagatcggactccagggtgtttcatgatttcaggcccccaagatgccatccgggtcctcacatgtgacctacagtcccctccctctagttacccacctaagaagcacagagcggctctcaggcccgcacgagtctgcatgtgcgtcctgcagctcctcctgccgcggcctctcccgcaccctccttggtacagcttctccctccctgtccgcacatccccggctctgctgttctgcttctcttccaaattcttcccctccatccctctttgagtccctctgttagtcacctcccacagccccactgcagccccttcctctcctagtccatgaccgcatggccatcatctccatctttcccccaaccctcagcatctctaaccctccccgtctggctcccccacctaacaaatctccacaatcccccccttgccacccctcccccaggctgccaagcccatctccagcacacggggcagatcttacagcagaaggatttaattgcatgtcaaaattaaatctcttttgatgaagaacaattcaactacggctctgcctaatcaaattaacaaagtcttttttaattttcaattatcttcttcacaggaacactttatccaaggctcttgtgaaggtggccgacaggctgtgcattcacaatgaagggccctagcctggacctgctgaccgtggccctggctgtcagcgcccctggcctgggagagggctgcacaacccctggggtctgcccagagcctccttggcctcttggaagcctttcctagatgctgagccagagagcagggaccgtttactgcagcatttgtcctttggaaatgggagaaaaatgggtgaggggcaggcactcaggagaaggggctggaaatcgtggggcaccagctttgcactgagaaccaagctgagcattttggatgcatttggtgagcaatggatccacagtggccctcaacagaacaggagcctgggttctacctgcgtgctctggtgccctgccaccacactttctaaacacctccagcctccaccacactttctaaacacctccacgagcacttccgtatttggacgtcgctccacgaggcacctgtgtcggcagacattgctgccccaagaccagctctgtcccgtggaaatgcaagggagccacacatataattttatatttcccagtagtcacattaagaaggtaaaaagaggccaggtgcagtggctcatgcctgtaatcccagcactttgagaggctgaggtgggcgaatcatgaggtcaggagatcaagaccatcctaactaacacggtgaaaccccgtttctactgaaattacaaaaattagccgggcatggtggtgtgtgcctgtggttccagctactcaggaggctgaggcaggagaatcgcttgaagctgggaggcggaggttgcaatgagccaagatcccgccactgcattccagcctggatgacagagcaagactctgtctcaaaaaaaaaaaaaaagtaaaaagaaacacgtgagattcatgttaatttttttcacttaacctgatacattctaaacattgtcaggtcgacatgtgatcaatgtaaaaaccatgcatgagatggtgtacatgtttttctttgtacggagtctttgaagcccagcgcgtgtgtccccatcacagcacctctctggctgcactgtgagtgctgaggagctccccggggctcggggctgccgtgtcagacagcgcatcctgggccacagacgtgttagggccggtcaggcagggcatcttctggtgtccatgttcccctcaacccacacaccgggcctggcatccagctgtgcggaacaggcacttggtgtgtgaataaactgaccaccttgtacgacttcgatctgttattgaggtaggggcagagttgggggcaggactctcctgctaggggaatcacccctcttttcccattttctgaactctgagggcccctcagcagccagcagtctcccaggcaggcctcagcgccttcctttcccatctccaaatgttgcagctccctccctggacttgagagccccaggaggaggttatttggaaacgcagacagaagggaaccagcctctcagcggggcccaggggtgcactgaggaaataaaaccgaaacccggtgtcaccatcatcacaaaacatatttgacaaaacgtctccaaggacagctcagtgctccatgcactccgatacccttccaacagcagccgccaacagagccccccagggcatggcagaaaaggtccagaaagactaaactcacacactgcgggacccacagaataggagaccgtgctgggcttcagatctcaccctggggtggcctagccatacccagccacccagactcagtttctctggggctcttgtgccaccacccaacgggagacgatggtcacattcactgaagcaagctttgggcaccaggcactcgttcatctgctgtccatggaaaccagttgtcaggacagcagcatccactgcccaggcttccactgcatccctgcagggatggggggctctagaccactccaggttgggggctaagccttccttgtgtcccaccaactgcgttaccaaacagcctgtatcttgtcatgacagtggcaaaaagtgtactttcccaagagcagcctgtgttgggcggcacgtggttactcctcagggggttcttgggcaaacctgtttcccatgtcctctagggcaggagccagaaaggctgacacgggcaggcggggcccctgtgaactggttccacatgtgcttgctggggaagccaacccttgcggtcatgggcaaccctttctttgaaccaaagacctgaccagattggccacaaccacactcacgcgcatttccaaggcttcagtgccagcatcctcgcaaacagcttctgaatgccattcacccaatgtggtcctgggcagcgccctcttgcctatcgcctcccaggctccttgcagcctgatgcaaaaggaacagggctcctgccatcctggcgtccatgctttgggtgcttgctggtggatgccatcaggggagcctgaatggggcatttccagaaccttgctgacctcttaatgaggtttagggtggggaggccagggtgactaacttgaatggctggtttaaattttcttaacgatgggctttagctattaggaccacattttctggggctgtgtgggcacatttccaaatcaatcaatctctgcctctcaaacacacacacacacacacacacacacacacacacacacacacagtgtgtagaatcaataccgcagccttcaccagagccctggggtccagtatctgattattgtcctcttgagatcacagcacagaagaggatgggaaaaggggtgtatccatagaccagggacaatatcacatcacacagcctgcctgggggcttccagccacccctcgcctccttcacccaggttgtccggcctctccccaggacaggctgttgtctagagggtctaacacggctggccacgtgaccactgcctccccaagcggcccaagaaggtgcaaaggcaccctccaccaccccacggccgcggcggtgcaccagtaaaagtagttaactgtatctacccttcagcacagagacttgtttgatcaaagatttagtcactttttctccccttccagcacaaaatcttgggctttcttgacagagaattaattgctgctgattaaatttcattgctgaaggaacacgcatccctggaggagtacccccccgatggctgcctcctgccccaacgtgtggaaagtgccccttacagagtcagagcatgggacacctgaggggttcctagggactttctgtgggtgcaaggtcaggaaagtactagaacatgtggtgggaatcatgatggttaatgcccagagcttggtgggtgaggatcaggggcaccccctggatgactgtagggcctggggagctcagtgtcccctgcccctccatcctggcacacaacacccgggagatgctgctggaagagcagaaagaggcctccctggccaacactgggtcctggcattccctgcctcttatttcagaggtgtagtggcccccgggacccccatatgtggcaaggaatgtcagaggggggggcaatcagggtatgtgggggaaggcaagattcagggtttggacccaaagccagacacggggctagaagccaggctttcaaaggtcagactggactctggaggcaaagcgggactcgtgtgagttctcgcagccgccacatgcccacagcaaggagaggacacctacagcgggctcagggcgagggctgtggccaggtcaggcaggtccaggcaggggagctgcactttctggggatgtcggaaaacaaagagggtttctgagcctccaggactcactctggggaccccggtaaggggagcgaggaaggtaatgaatctcccaggaggccgcactgccaggcactctctgtaggtctgttcagagggagctcttagaggctgtgggggagaagtccacccacaggacatctggccacgccctccctgtctatgcctaacagacttacttgcttgtaaggggctggtccacctccctgggagtacatttcctggcccaagagtgttcttgcagggtgactgcacagggggtttaagcaggctggactctggagaaccgtctgccctcaaaatgcccctctctgtggtatctgcaaagccagcttccaaacccatgcaagagagatgcaccaagaatcaaggggccggagccctgccagcaccctcctcaggcccacccaggcctgcgcatctggggaccaaggcggtcaatacagttgatgcctcgggaagtccacagacggccaggggtgaggcccaagcaggctgcagcctcatacaccagcgctgacccagctggcgggccagtcacctgccgtggaggaggagctgctggcaggctggctcccacccacaccggcccctgaacacagcacatctaaatactggctagcagttgttggccaagagtccagcggcaaaacgcatcttccgggggatgtttcagtggggagggagaccttccaaacttcggcagctacacgccggctgctgcccacccaaattctcccagcattatctggggagaggcccagaaggtccctggagcctcatcagattgcccttccagggcctggttcagaggcagggctttgtggtgggaccaacatttcccggcccctgccaggcccttgcaaacccctcgggtcccaggaatgccctggctcttgggcccacctgccacaaacatcagcagcttgtcccaaaacacctaacgtgcatgggaaataactgggaagggcagagacgggaaggggaggacagagcctgggaagagagctctccagggtcccacaacaaggcagaaagaagcccttggcagctcaaaccagagcacccagcagggcggggaggctgcaagggaaacaccaggccccatgtccactaccagccatgggaagtcaggcaagacccacaaaggtcactgaaggaagagcttcaactttgccaagaagctcatggaggagcctgaaaccatcatccatcgagggtgcaggatgcaggacaatcagcgagcccccaagaacacaggtgtcctgtcctgccaggcaggaggggctgtgcctgttcctggccacagtgatcagagctgctggctgagcctggtcccccatgcccatctgagaactctcagtgagtcacaaagacagaggttcgctctcaaataccacgtgtgctgctccctcattctgtgagccctctgggtgggttctatcacccccgttacagacaggggctccagtacctcctgtgacagacgggctccatcagctcccataacagaaggaggctctatcacctcctattacagatgggggctccatcactctccattacagaaggagctccattacttcctgtaacagatggggttccaacacctcccattacagaaagaggctccatcaccctccattgcagacaggagctccatcacctcctgtaacagatgggggttccatcacctcccattagagagagaggctccatcaccctccattgcggacaggagctccatcacctcccacaccagatgggggctccatcactctccattacagaaggagctccattacttcctataacagatggggttccaacacctcccattacagaaagaggctccatcaccctccattgcagacaggaacctcctacaccagacgggggctccatcacctcccattacagaaagaggctccatcatcctccattgcagacatgagctccatcacctcctgtaacagatgggggttccaacacctcccattagagaaagaggctccatcaccctccattgcagacaggaacctcccacaccagacgggggctccatcacctcccacagcagacaggggctccatcacctcccatgacagaaggaggctccatcacctcccatcatagatgaaggctccacgatttcccgttataggtgagggctccatcacctcctgtaaaaggtggggctccatcactactttacacatagggaaactcaataagagccagaaagttactagtccaaagtcgacagctagtgagtggcagggctggaatccaagctggggtccaaagccagagccctcatactatcaccatgatgtcagtgagtgacagaggaaggagcccccaagtgttctgttctccaccaggtcccacagagccagacaccttccccagagtcagtgtgagctcccggccaacaaccacgggcacctttccccaaggagttccttccccacccgacatcttggccccgctgttccctgcagcccttggggtccagcccctccaggctacccggccccaccccctactccaagcaggaccacatttctgactagcctgctaagaaggctaagttctcatgtctctacccaccccgcctagtggcagaaggccatccctagcagccatgtccgtgtgtgatgtggcaggaccccatattttgacatttgctgtctacttgggaagacaggtctacttatgaaggagaaaaatggaactcagaattggaaggtagatacctggaaggcagaaactctgctcttgcagaattctttttcactattttttacatgattttccccaccccattcacaggccagtacctctagtactgaacagggacaggaaagcaggacccaggggtttgagaggtccccagggctccctggggtccctcttgagttctagaagagtctttactgagtcctactgtccaagcatggggtctggccacactcatgcttacacacagcatttccactgcgtgacttcagtaatttgtttctacagtaaaaactgatctgatacagcctagtaaagggttttgtgtatctgagtgtgcttttcatcacaaaaaaaccccagcatccttaaaggttaagaaaaatcggtcctattattctaacaactcacaggcgtgagtcaaaacatgaaggcaaacacactctggggaacactcatcagagaccctgaaaacaagtcccaggtcttttaaaagcaacctcagctttccggcagggcctgatctagggataaatactgccagggcccacagggtcccaccgtcttcactggaagatggctggtaccgcccgcatgggctggatgagaaagctgaggccagagaggacaggcttctcccccaagccaaatacaaatgaggggccatgagctctgcctcactgtggttctcaccactgcctatgtgccatgttgttggactgggggcccccaggctgggtgcagtggggccacttctttcactgggagcaggaggaagattcttcttgcctcctgaaaacccataaccacactgcagggggcctgggcacttggagttcaagggaagagcccactccttcccaacccataccccaagagcaggaccagactaacgtgtgcatgggtatgtgtgcactgtacagtgtgtgtgcacatgtgcaagagtgtgtgattgtgtgtacgagtgtgcatacatgcgtgtgcatgtgtacatgtgtgcatgtacatgcatgtgtgaacgtgtacctgtgtgtgcatgtgtgaatgtgtacgtgtgtgtgtgtgtgcatgcaagtggatatgaacttgtgtgcatgtacatgtgtgcactgtgcagtgtgtgtgcctacgtgtgcatgtgtgtgcatgtggacatgtatatgtgcatgtgtggttgtgcatacaaatgtgtgtgcatgtgtgtgtgcatgtgtgttagcagctctctgaccacacagactgggccataactacgcagcccccatgtgctccatgggctgtgactggggtgggggctctatcacagaagagtcatgcccaggccagaagagcttgagagaacaaggagttgggcccttccagggcctcaaaagcacccaggcatgaccacggctgaacgaggatgcagagccagtgcaagatcctgttttagggagctttgtcaagggttactcatctccccacgcatggagcctgttccctacttcttccaacacacatggaatcgttttcagctgtgtccagatgccttcccacctgcatgcgccttacttagtcaccaaaggcaggcatttttaaaagagaagatttttaataaatctctaatctcttttaaaaacaggggatttaagctggctctgagcgcccctgctccaggaagctcactgcacagctgcgggctggatctcgttcccacctgcagcagcactaccctctagtggccacggaggatgtccacgtcccggccagggttcccggcaaggacacaggtggcagctcctcagcagccgcctccagccacccctcctgcacatgccccggtgctgccggagcctctcgccaagcatcactcacacaggtggccaccacagccccactgataattcatcttgcccgctaaccacttatctctgagctgtgctcaccgatcaccatcctctcccagcggcagggaacagattcccttaactcctcccagccgccaagccctccaatcctttagaactggggccttgcctctcagcttccttcgcctcctgcaataagcatttcagagggagacgtggccccaccaatggccttttctctacatccttcctccacactgaccatgaatgagaacagagacggagggacgaagcggtgggcgcgggggggcggtgtggcaagcaccgcgtcacaggggaggaaactcacttttgaagtttggggtccccttcctctctccctcgctgctcttccaggagagcactaaccaccaaacctcgggtcactcacccctttggtgtgcaacgagagttggtggttatgtgacatatggaggactgggggtagaaacacaaaggtctggggacccctagaatgagatgcccaaataaacagtagctgggtattctctggagcactcctgcccctgggaggccccctttctggacttttgacttctccccgtcagtaatgctgcagctggttcgtacttttcaggaactctacaagccagctgacagcagctgacagcccttgagggggtatttacagcaggggaattgacaaatgctacacatcaacctgctttagttcctttggaagagcctattgttaaacactgagtcccccaccctgcctcggcctcagtgggtctccactcaggtaagggcagccttaccgacacatgacacatgagcatgctgggccggtttccagactgcctgactccagagatctggggtgggacagacgacatgcctttcttgtacgttcctggggaatgccagtacttccaggctggggaccgtacttggggaaccagtgctcagtggttcatcagcacgaattaatttatacaaaggcacaaaagacaacagtttagaatgagaggagactgagggggccagggccatgctcagatactgcagggctggagactagcgttttctgtttccaaagcagagagggtttcagctgagaaggaggccttggagcaaccagagccaggtctccgcagcctccaggtctctgtagcctccgggtctccgcagcctccaggtctccgcagcctccaggtctccgcagcctccaggtctccgtagcctccaggtctccgcagccgccgggtctccgcagcctccgggtctccgcagcctccgggtctccgtagccagccacccggccgaggggctgggtccacagaggaggaccagcagcagtgaagggcaagtccacagagttctgaggtgtccaacctccgggacgctgcactgactttcaagtgcccagaggtcctcctagaataacacatccctccgccccatcatcctgcaatcctttagctggcagacaccagcatcccggggggacttcttagactccactctgagtttggctttgccacgctgtggtttcatcacgaccatcacggccaggtgacgggttccagctcattcggggctcagccccatctgcccactttggtgctggaaaatgcactcagagtccaaccggcgtggaaatacagtctttgcgccactgctttttttttttttttttagatggagtctcgctcttgtcgcccaggctggagtgcagtggcacaatctcggctcactacaacgtctgcctctcaggttcaagtgattctcctgcctcagcctcccaagtagctgggattacaggcgcctgccaccaaacccagctaattttgtatttttagtagagacagggtttcgccatgttggccaggctggtctcgaactccttatctcagacaatctgcccgtctcggcctcccaacgcatggcccattcaaagtttgccagaggcgagttcagggtggggatcctggcagtgggaaactggaggagcgcatggagcatctgagagttgaggcagcggaacccctcaccaggaggcaccttcctgcccagacacctcgggatgagcccctggtgggactgctcgggtgccggcagggagttcctggacccacccaaagccagctctgcttctcccttctctcttcccgctttcttctccacagccccctgattcccacagatccttccctggaaggctttctcgctgtctcttcaaagtctctcttctacccactgccatgggagccttcgcacctcgggtctggtggcctgtaacccctgccagccaggctccctgataccagcctctctttttccagacagtctgattaacttttctaaaacctcactaccactgtatcaaactccagcttctcttcaaccgtcagcgacttccccactgcttgcaggatgaaatccaaattccttagcgcaacccccaagctggggtctcagctccagcacctctcacctgaccctcaatgaccagctgtctcagggggagaaaaagggaggatttaaacccagcacacctgggttcaagcttcagctctccttcccacgattggtgaacactcgggcaggttacctaacttctctgagcctcagtctcctctgcttaataatgggtggtatcataacatcttcctgaattattatctaaaatgtcaagttcatgacttgtccgcccaaatacggcaaatgccaccgattttaatctcacccgaaaccaacctcacaggtgctgattcacttttaggaattaggaatttagttttaggaatgaagaaatgaggcccagtgaggtacatgtacacgtgcacatgtgcatacatgcgtgtgtacttgcctgcctgtgcatccacatatatgtgcgtgtgagcgtgtgtgggcacaggaaagtctgtgtgcacgtgtgagttagggtggggggtatgtggagacaccaggaccaccaacatgcatgacaacgagaaccagtacgcatgtgtttgggggacagcacacccccgctctgatcctcggtttccgaatctgttaaaaaaaaaaggctccaggctggacaagccccaggtcccctccttcccggttctgaagctcacaggtcgcgggtttgctgagaaggcacgtgctccccctggtggaaggaaacttgtatggcaacgctcccgccagggccccgcgatggtcaggctttctgccgtcttggaaacagacaccgacaagcaacagggttcccatagtgcccgggcacttcggacccgctgcgggaccttgggcaaactcttttagcctcagcaccttcctctgtgaaatggagccaacaacagcacatcacagagctaacagtaaagaaaactggggcagcctcctcacccccgtctcttttctcagtggttagttatgccaacgattgttccagaatccaaactcacacagcagagagaggcagctcagcacacggaccttgcagccagttggccctgaattccagccctgccacttactagctgtgtgatcctgggcacgtgatttcaccgtctttcattgtggagttgtgaagattcataagctaactctcacacggtagtgagcgcagggcccggccactcacaggtgcatggtaatgtcggtggtacaggtgtcttgtggctgtcactgaggttgttcataatctcctggctcctgttcctgctggagccacggggagctgcccttcccacccacttaagttaggcaccatcccgtgacttgctttgcccaacaaaatgggagcagaggggtgtcacttccagccgaagtttgcagaaccaacagtgtgtgcagtaccacaccctctcttcccgatatctggcaagcatcgggcagtggctctatgagcttgggtcctgagtgagggcaacagcacagcacaacaccctcaggaaccaagatgcatatgagccagaaatcaacccgcaattgctacagatctctgatgtggggttgtttgttactgagcataacctgctgctgctgactgagacactgactcctgcagagcttctctgaggagaaaggattccttctcatttatcctgacatgtacttactaaataggaatatttatcagttaacgaacacacatttcctttccccaaacctaaactaccaagcaagagaaccaccaaaatttgcaattccaagtgcatcgtgatggagaccaaagccccaacttgaccactacacagtctgcacatgtaacaaaattgcacctgtgcccccaaaatatgtaggagttgtaaaatatacacaatgaactgtgatatgagcaagagatagaacatagcagagtgcaaaggcattttttctcaaacacacaaaacctttatggagacggatttggggtttcacagttcagttccacccgcgtagccgcctgctgcagcacagggggaaagggaggcttggggcacctctcctacccacaccccaaccccacacttccacctgcacctaacttgcttgttagaagacaggagagtcgtggttacaatacactgggagggagatgctggacgaagcaagcctctcaggggagacccggccagtgagcagccgcagggaaacgctctccgttcgtgtggtccctggcgccacctcgcggcgctggctggcactgctgggagctggctcctggtcggcaatctgctcctgctcctggccagggcaatagcacactggatgctgagcgggtcatcacacacatcggagctggtcatcaatgaacatctgagccagtcatcacatacatcggagccggtcatcaatgcacatctgagccggtcatcacacacatgatctgagcctgtcgccacacatcgtctgagccggtcatcacgcacatctgagccggtcatcatacacatcatctgagctggtcatcacgcacatcagagctggtcatcatgcacatcagagctggtcatcatcatgcacatcatctgagccagtcatcatgcacatctgagctggtcatcacacacatcatctgagccggtcatcacgcacatcatctgagccattcatcgcacacatcagagatggccatcaatgcacatctgagccggtcatcatacacatcatctgagccggtcaccacgcacatcgtctgagccagtcatgcacatctgagtctgtccccgtgcacatcatctgaactggtcatcacacacatcggagctggtcatcagtgcacatccgagcccgtcatcatacacatcatctgagccggtcactatgcacatcgtctgagccaatcatcacgcacatctgagttggtccccgcgcacatcatctgaatcggtcatcacacacacatctgagccctcgcctgtgggctgagatctgcgagaatggacagagggcccaggatggaaaagcatgagggactcaaggacgacactgtgtccaggtccagggaggagctcaccctgcaccctgatcactgagacactcactccccacagtgcagagtgaccctgaggccagagcccagccaagcccccatctccaccactggggcaggggtctccagggccctctgagtgcaggtggggttcatcttaccccctggaaaacagtctggcttctatgtccaccctaggccggcaccctagtgcttggccaaaaatggagcaagccacgccagcctcaagggcctgtccttctccatccactccaggacaggaggctgacagtcaaggcagcacgcacagtcctcccagcgagatgagcaaatgaaggacgtgaactggaaacaggtccacagagtaaacaaatggcccccactctaaatggtcttgtctgaagccttggaccatgcctctttatccaagtctctttgcacagataattgttccaacactgaagcctgagcccccactgacccacacatctctctcctcaactaccccaggctcattggagccacagctctgccccactcctgagacgtcccgggccctcgctacatgagtgacccagtgaggtagagggatatgagaagagctaggagaagggcctggagacgcaacacaggcgctcggggcgtgtgcaggtgggacgacgcagagaggcggcaagacgtcaggaggtgccagaagggtggatgagaacccagggttaagtgcagccttccagaacagccttaaaggtggatcagccatcccagtggtggccacagctgctgtcattcagtgcgactgatggggatccaggcccgcaaagcagtgctctatctgggcctcccgtcaaccttctgccggagaccagggattcaaggatcagtggcaaagggctagatgtttttgttagtccctttgtttcatttgcagccacgatgagctgacaccggacccagcaatgtgtggcggcctctgtggagaacagctgcaggctctatcttgagcaagcctttggctccctgcctgggaggacccctcctaagggatggggcattccacacctggactgagcacagtggagccaaccaccgctcagtgccgggaggaaccacacttcctggggacctgctatgtgtctggcctcgcttaagctgcatcacatctgtgagccacacacggctccatttgtacaggtgaccctcactgaggccaaaggtgtctttgagaccctctctcctaagccaggctcagcacacaagccaagagctctgggctgtggtttacagtggacagcgaggttcccttcacactggatggtgacagctggcgcccgcctggcagttagtgtgtgccgggcactgatccaggggcttccagtgggtcatctcccccaaccccaacgggtgggactggtggtctttcgctttgcagaggaggacgctgaagcacaaggcagaagcgccttgcccaaggtcaacaacagcaagtggctgagccgtgacgtgaccaggagcccatcacgtcagccctggattgaggctgcctcggtgactcaggaggcttgagatcccctcctggctgtgggagcagagcatcctgcagaaggggtagaccctcacctgccagcggggctgcagctaggccatggggcatccctcacccttggtctggggtacaggtgcactaacaaggtgcacacaaggagccccgcctgccactggtttccgttccaggatccgggtctggtgtcatctggatgctcaagctgccaggacctgaggatgtctgagcccctgagtccttccccagaactctgagcatctcaaaagtaacagggcagggtgcaaagccacgtctccacctggggccggagggccctgcctccaaaacctgcctcccaccttcttttggttaccaccttggctgcctggacctccagtggaaggaaagatacccttttggatcaaatttggactgggcagagccgggggagaagggtgtggctgagctcagaacagagaagcccaaacttgaagctccctgtgtctgtgcgtctgagatgctgcaaagtgacctctgctgcccacgaggactcttgcttctctccctgctcatcctggccttgccctttaaaatgcagcatcctaaggaaaaggggctccccactccctgaaataaacctctgtcttctccagcacaatgataccagaagaattaagggtttctttccagaaagggggaaaggacctccttccttaatgcaaattttattctgactccccctgagaccccctccccagccctatgcccaccctgctctctaagtgggagggcatcctcacaggtgctggccaccccgtcattatccagagaaaaaagggacccagactcaggagggctgtcattgtccagctggcctgggtaggcccacctactgctcggagggatgaaagctgtccccctcgggccccaggctgtgggcaggaccagctacataatttgcagggaccatcccctcattaaaaagttgtccagaattcccagacagcaacaacagggcatgaaacccagcctggatcccttctgagtgcagcttccagcgcctccaccggtcacgggtccgtgaagccgggccagggtgggacctgtcatccatggtagggaagtctgcaaggagaacgaacccctgtcacagcggcagggaacgcgcaccaggctaagccgcagagcctgaatcttggaaatgcttcctggctgcaaggacgacctgtctcaaggggtggatttgggaataaagaaatacagctttgtcactttcacagcatcagtgtttccaggagacgcctccccacagccccgcggacaggcaggatttccttgccatagcatcactatttacattcaaataagtgactatccttttaagaagcgtgggctgggcgcagtggctcacgcctgaaatcccagcactttgggaggccgaggcaggcggatcatgaggtcaagagatcgaaaccatcctggccaacatggtgaaaccctgtctctcctaaaaataaaaaatttaaaaaaaaaattagctgggcctggtggcgcacacctgtagtcccagctactcgggggtctgaggcaggagaatcacttgaacccgggaggtggaggttgcagtgagccaagataatgccactgccctccagcctgggcaacagaggaggactccatccccaaaaaaaaaaaaaaagtgcgacccccacccccagaagtttagaaaagcccattaagagcctcctcgcatacctcatttcccatcaaaatcaacctagggcagatttaagcttcgggccaggtgagctggccatagtgtctgatttagagcagcccagctcacacctcactgacatcttttcctttacgacatggtccaatggctgagataaaccagctgcatcacaggagtcacggcagggacctgttaccacccccgggaggcctccaggacgtcggggaaccctctgtttttctggatacctttctcaggccacagcggtgggcaggggaggtgtctcagccttgacagttcgatgccagcaccgaaagctacaaccacaaacagaggccctggggctgggaagatggattttccgtcctggatcaccgtgagacgccgtcacgaatctgtccggcggcggattttcagaatattctcgtctgcggtcctgcacacccccacccagacagctttagggtacagacagtatcacaggagtttaaagaggaggaagactcggagcccgaacgaggctctgggcgccttgtcggggccccagagtcagggctttgcagctgagcagcaattagagcccaatctagtgctttgcaagaaagagaaaatacaagcagtgctgagagcagtcctgatcctgctgggcctcgggaggctcattatgcaccagaaaggaggcctgcagaaactcccagaactgccccccaagtatgggagcgtccagccctgaggcgctcctggcctagacgaggcttcattgcatcaatttgcaccacggtttcagaaaagtgggaaagggtgaaggtgtcccgtcaccccagaatgtggggacccactatgggatgtgaactggcgaggcctggcaggaggacacagcctgacgatatctgtcagcgtttaacatacgtacaccacataaaccacgtcagcggctctccaccgagagtaattttacctcctggggagggacacgtggcaatgtctggagacattgttggtcatcgtaactgagggaggggcttctggcatctggtgggtggaggccaggggtgctgctgaatgccctgcagcgtacagggcggcctccaccgtgggcgacgatgcggctcccacgtagcagcagcgctgaggctgagagagcggaattaccctgggagatgtgagtgcataaagtagtaagggcaggggcacagtggccatctacgtgatgtttaccgggggccagtcacgagtctgaccacttttcacctggggactcacttcgcccacccaacacacacagtgcacagctgaactgtgtccctctaagataagttgaagcgcaaacccctggtacctgtgaacgagatcttctttggaaacagagccttcgccgatgtaatcaggtaaagatgaggtcatagggtgagccctaacccaccatgactggtgtccttgtaggaagaggaaaacaccgtgtgaagacatgcatgagagaaggacgcatgacggcagaggcagggttggagtgacgcggctacaagcccgggaacccctcgggtggctggcggcccccagaggctaagaagccgtggggaggattctacctggagtctcagagggggcatggccctgctgaccccttggttttgggcttctgacctccagaatgttaaaaaaaaatcttgtgtttccagccacccagtccgtggcagtttgttacagcggccacaggaaatgcgtaccgtgggtgaggctatccccgcttcacaaatgaggaaaccgaggcaccgggaggcaaaggtgcgtgcccgcacacacacagctggtaaatcagcagttttgcttccgtgcacggctcgcgcttctgattagagtgacagcattgcaccagctttcatgaagggttttcctggcgtgactgcaggttccatgtggagggcagggatggtttttttttgccatcttttcaagacagtggttcagggaggacttttcaccatcaggggtcatcaaatttagcaaaatcccacacggtggccgcaccagggcccagcaggccacgctctcccagcagtcacaaaggagaaagcaaaaaaaatctacctttaattttgtgggaaaagtgctgctgaaaccaaaagacaatgtccattatgaaaacctgtttttaaactctgatgttctcatcaccttttcctgctggcttctcaggcagatgtagccgaggcccctccccggggagcagcagacaccacagaccctcgggcgctcccgtcttcagcaagcgtgaacgcgccgctggaaagaatgctggctttctctccaagtgaacgttgtccttaactggctagtgcaggacagtctaactcccgctctggaatctagacatcgtttcccatcactcaggaaaggtctggagatatccaggttcacccactgcttgtctctacccacagattctctcaggagtgctggagggacagtggagccactgctgatttaaccggtttccagacacttccaacactgcccctgggatcaggatcggagcaggattctcggggaatggggtttggagtggggaaaaagtctgacagtgaaacaaatgcaccacggggctctggaactccagaggggagccacaaactgggtggctcagagcaacatgaattttttccttcacattctggaggtcaggagccccaaaccaaggggtcagcagggccaagctcctgctgagactccggatagaattcttcctcatggcttcttagcctctggagccacccgaggggctcccgggcttgtagccgagtctctccaaccctgcctctgccgtcacggggccttttcctgtatgtgtcttcacacggcgtttttgtcttcctacaaggacactggtcatggtgggttagggctcaccctagtgacctcatctttacctgattacatccacaaaggctgtttccagataaggtcacgttcacaggtaccagaggttggcgcttcaacttatcttagagagacacagttcacccataacacccacctcacaaggtgttgggggtgggtgaagtgagttcacgtgtgacccgcgaattaaccacagttttaagaatgcagaaggctcagacacactaggaagatgcggctgtaagcggggtgtcccaaatgcagcagctcctgctctaatgcccgttgactgagaggtgggagctggactcacccctttttgggggcacctgttggccccgtcactgccctgatctgggagggtctctgcatcagtcaggccacctccgaagccaaaaccgaagtccccacactctcctaagctgggccagcccctcacaaagctgccacaacaccttgccacctggggagctcctggatgtgtctacagacagcctagctagcatccctgtgccaagagatcctcctccgaacaaaaacgagacaaaacagaaaaacacgtcgtcacaaccctacttccaaagctagagatccgggcgtgttcatttttaaattcacagacgcagagcctctccagtgctgccctgcagagcagtcagccacgctggtgctcgcttctggagctgcttctagaatgacagcggttcggcaggggagatcaattcctacaggaacgatcaaaggaaagataagaacttcggggctccgcggtcaggttccactcacagccagcttctcggaaaggagccctgagcggcgggagccacgcccctgcgcacgctgctgctcacgcgccccaccaggtggtagaacggggctactaccactttaaaataggtcaacttcaagccaaatgggaagacaaaaaaataagaagagccagtgagccccccaaaacgactccttcatgatccaggggtacagtcaaccaatcagccaatcaatgagaccaccttgagagagtctgcaaaatgcaaacgccttattccctgtcctgcgtgtgtgttcccagtgtgcacgtgagaccctgccttcagtgcagagggagaggggagggaatgggagaggggaacctatttcttttgtttcacttttaaaggagacaacactccagtattccgcagctcatttctcccttcaccccgatcccatgccccgtgtttggacgttcgctgagcctgctccgtgacgggtctgtaagttcctacatggggcgtcctctctatgagccccagggcacctggcccagcagttcacggtctgtacccactcagatatcattgtgggtctgacgaccggctccagatacagcagcttgacacaccagccccagcctcccgagggagcgcggccctgccttgatcctggactctggcctcctgagctgtgagagcataaatgctgctgttgaagccacacagttgtggtcatccgttctggtgaccacaggaaccgcatacggctctcttacaggtgagaccttccacgttacctgcagagcagccacctgggagtcacacctgagaaagagcagaagcaggggacaatctgtggcccaccaccaggagcccagggtggaggacccaggcagagctgggcatgctcagaggctgctgtccccatggcaccactcaaggagaaaaggggtctctggagagagaagaagggaaggggctctgcaagggaggcaggatccacttggcagctgctcaaatttagtttgcacctcctttgccagtgcagaagaaaacaaacgacctgcgaactgaatgaaaaatggtgattcattacccctgatgtgtgatgatggcttaattatttttctaactggggagagacgctttctgacagcaggtgcaaatgaattctccactgttttaaggagtgattggcccaggacaggcggaaaactgggaaacctaattaaattgggagccccatgaaataaatggagcggggagtttgtttgcttgtgctaacggggattaacgatcccctgagaagctgtagggctcccgctggagtgagcgcagggggccccgcggggcggacacagacaaagcaggagccacatggggtggtggggaccccactgcacaggaaagggtgggccagggcctggacgctgagctctacgactggctatcatctttggctctcggtctccttgtctgtgaaacaggaggctggacgatgggaggaccaggtgaaggctcagtgccaggtgatgggatgggatttcagagcacgggtttggagttggacagcccggggtcagagccagtgcaccctctgcctctgacccggatccagcttggatcctcagttttctcatctctactatgggggtgtgagcagtacctaccctcccggatgtcgtggggctgccccgaggttgcaggtcacattctcagcaggagcctgacccacaggacgtgcccggcaaagagaaggctcatcaggatcgccatcagatcatgctgaaggtcttcatctgctctgctgtgggaagggctgaccctcccaccaggcacactaacccctggaccttttctcatctcggaagggacacagtggccttgctgggagaggactgcagccagggggaaggaggaagacttggctccctccccctcgctggggccctgaacaggcctcccttggtgcttggggaggggcggtgaaaagcaagaccctccccaccaccctgtatgtcctcctgatggctgagagcctgctggtcgccctttagcttgccagactgtcctagaaggcccttggctggcaaggcccacacccctaccaggtggggccaggtcccggcagcagggctgcccctgaggtcagggatctgtgcaaattagagacgggcagctcccatggggggttcaggctcctgtggatgggcacctctgtcagggatatctgtcacctacaggtgggcaagcctgacttccagactccagagctcaggaataatccgtgaacacagccccaccatggacttccacccccgtcagccccacagctccacaggtccagcttccacagacccacaggtctagccactgagggctgtgctgtggtgggaacgtcccggacagcttcggtgggaaagtccctggtggctttcctggcttgggcagggcggggcttgttccctgtcccccagtacactgccccctcacccgccctccaggcatctgtgtcagggcaaacctgcccaggccccgtcctctcaggttcccccagcacaagctcccagatgttctttttctttttttttttttttttttgagatggagtcttgctctgtcacccaggagtacagtggcgcgatctcggctcactgcaagctccacctcccgggttcacaccattctcctgcttcagcctcctgagtagctgggactacaggcgcccgccaccacgcctggctaagttttgtatttttagtagagacggggtttcaccatgttaaccaggatggtcttgatctcctgacctcgtgatgcacccatcttggcctcccaaagtgctgggattacaggcgtgaaccaccacacccggcccaggatgttcattttctatggtcctctcttctcactccttccctgccaagggtgatgccagtgtcccgtccccactctcagttgaacacacagatttgggggagcctgagggggagagaacaagctggcgggaagccgcaggactgaggcccgtgaggacagtgggcgtgggcagggccacagcggtgggagccctccatgtcccagcccaccaggggcctggctaggcactggttcctccctcctaagccaactctttgaggtgagcagtctacactccgggcatgagggatgcaaggagttgggaccagagcacgtgtcaaggagtcccagcccgcgggcaccccaggccacacggccccactctgctgcaaagccctctgtgcccaggtcacgcagctggcccaaagatggcaggagacacagatggacgcagagggccagcctgtgagaagccaagaagcactgggggtccagtctcagccccggcgccctctcctctgcccacatccaggccaccagctccacggactctcctgtccctcccctcccattacctagcttctggccctcctcaccacccctgtgggtccctcaaatcactcactgggcccagtcctgctctcacagcctccctcccccaagaaccatccatggctccctgtggcctggtatgctcagacctcagctgcctgggccattcacctgtccatctccagagtccagctgccttcctaccccacaccaagttttaggcaattaactctttcctctatatgtgtttgacctcccagctagtctgtaaaatcctagaagaccagaatcatggatgttcaaagaagtagatagcctcagtcccctcctcaggacctgacacctagtctagactccaggaaatcaaaggcctgcatcggatcgtcccacccacggcaggatgctgggactcccagactatgagggcctcccaagcaatcaccacagtgaagcatgttccccaggtctctccaaaaatagccctttacgtattcatcttacagctgattttcccccaacattttatcaccaatatattcgaacatatggaaaagctgaggagtttgacggtgacggctgcaccccaccagctcgatgcaactggggcattctcctccacactggggcattctcctccacacgctgcatcacacatctgagcccatctccaccctccgccgcccgacaacctagtttattatttttgatgcatttgaaagtaagctgcagacgtgtgtgcacttcccccgatacttcagcgagtttatcatcaactagggtttgacatttgtttacattttttttttcttttgaggtaaaaattgacatacaatgaaatgcatgagtctgggccaggcatggtggctttatcctgcactttgggtagatcacttgaggccaggagttcaagaccagcctgggcaacatggcgaaaccctgtctgtactaaaaacacaaaaattagctgggtgtggtggcacgcccctgtaatcctagctacttgggaggctgaggcaggagaatcgcttgaacccaagaggcagaggttgcagtgagctgagatcataccgctgctctccagcctgggtgacagagtgagactctatctcaaaaacaaaaacaagaaagagaaaaagaaacgcatgaatctgcaaatgcacacagctgcacaactcttcacctgccaagatgcagaccatgcccctcaggaagtcccctcatgcccctccccagccattcccacctccagcccccagggcaaccactgtcttcactgttttccaccacctctgagttttccctgtcctagaactttctgtgcatggatcttgggactgcacgccttcactgctggctcctttcatgctacatcagggttttgaggcccattcacctccctgcatgtattggccccttgccccttttcatggctgtgtaatattcctaatgccccagggtttatttatccatctctctgctgatgaatgtttgggctgtttccatttctgggctcttgtgaacagagctgttgggaacatgcctgtctgtgttgttcagctacagcttattttgagagattattttctcattctttatgttgctttagaagatggaaaccaggcagagacaagcaaactctctttttgctcgttctcccagctgccgacaaccctagggatggggtcggctcagcactgcttcagccccaaaattctcacccgtggctcccgctgggggatcttgactctgccaggtcgcttctcagtctccacgtctcaggactggttgggtctcagagctcttcctgcaacaccctccactccgtgtccaggcaggacagccacctgcttctccctgggctggcgaggatgaggcctctccattgcctggctgttgtttctcccgccaggaaatccctgactcacttctaattgccgggaattgtggagagggaggcgtgtcccatcaggatggggacaattaacaaacggtgccctccatttcctttcacgcctgtaaatgtgacgcggcgctgagtgtcattatctccccatgtcctaccttcccaacatgaccacgtcgcatggaattggctccagcagttgataaaatttgcttcataaaattctggggctactacatgtgtttgtttaactggcttgcccccgccatgggaaagggtgactccctacaatgctggatgcttactgagcagccaggacctggggggacaatatttgggggatgcaaagaaatacccgaagctggctccagactcctctatgcagctgaagtggatctgcacggacttccatgccaggctgctggggagctatggtggagagagaggtgagctgcagatccaccggtgcttaccaacgtccgtgcatgcttgtgtgtttttgtttctgttttgagatgaagtttcgctcttgtcgcccaggctggagtgccatggcaatcttggctcactgcaacctctgcctcctgggttcaagcaactctcctacctcagcctcccaagtagctgggactacaggcacccgccgccatgcccggcaattttttgtatttttagtagagacggggttttgccatgttggccaggctggtctcaaactcctgacctcaggtgatccacctgcctcggcctcccaaagtgccgggattacaggcgtgagccaccttgcctgccctgtttgcatgtttttagtaaaagtaacaatagaaatctcacaaatgaacaaataaatcactcaactattgaataaaggtctgggagtatctgtcctattgttaaaagaggcttcccctgggggaggacaggaaggagtggggcttttcactttgtatgtgatgtgtttccgcatcttcattgaagtgctgtgagcttgtcctgccttctttcaaggtagtatgtaatttggctggagagcaagacgggaacatgcagtaactcacaatgtgagacaataaatgaggctccgcatttggcttccattcaaaccagaaggagcgagttgtctggaggacagagggtccctcaggattgggggacaaggcgtggggaggacttctgcaggattgcaaaggaggaaggagagctaggcggccgggagcaggaattcattcaaggtggcttgggggaaggtgggagtaacaccgaggcaagaatgcaaggcgccctctgagagggcttgtgaaaaacccctgttctcagagtcctctttgctaagactagaaacaacagagaatcgttcttttactcctttgcactatataaagacctactatgcagccagcactggcctggagtcggaatgcaaagatgaaacgccggcttctcctccaaggagctgtgtcgagcacggaacccaggtcccagctagtttgtttccagcgtgggctctggagcccgccagccccacttccgatcctgccctgacgcttgccagctgtgagaccccaggaagctgcttctgatctccagagttctgtttgctggtctgtgaagtggggggagaaggagcactcgcctcctggggtcactgtggggaggcaggctgcgtatctagcagaacacccggcccagacacacactcgatggctgggtctgcaggggctcttactaaatgatctctctcatcacagtgagaagtgccccaccgaggacagcttcttcacccaagcgagaccagtgggagggtcgggcagcccccacgcagcactgagctatgaggtcaaagatgaggaggtgagtccacggggcagaatcagccgaagaacttaagcagaaaaggctggagcaaccagcgggcaatgagatctgagcaggatgggggcccagggctctgtggctcacggccatcccaggagcctggccaagtcattctgtggttttaaagacagcgacctccgaacctgcgggttccccatctgctgctcagggctcccccaaccacagatctagacatggttgctaagggggtgctggatggaaggcaggtccctaggagaccctgttctgagaagcagagtcttaaaatgcatttagccgatgaggcccacattgtttggctgagttaatgccaaattgcatctgaataataataataaccagaattataacgccaggtaaagctgagctgataacatcatcaccatcattgttcttgcattaatggtctctctcaccaagtaattattgtagtattattattcatcgaggtgaaattcacattacaccaaattaaccattttaaagtgtatcatttagtatcatttaatctgtgatgcaaccactgtctctatcaacttcaaaaacattccatcacgccaacagaaagccctctacctggttaagcagcctctgcccatcaccagcccctgccacctggccctcagccctcagcgaccaccaatctcctttctgactctatggatttacctaccctgggtatttcatataaatggaatcatacaatatgtggctagacacaaaaggccaccccttctgctgagcacactgttttcagggtttgtccacgtggcagtctgtatcggaactgaatttctttccatggctctgtggcactcccttgcgtggccctaccacgttttgtgtgtccattctccagctgacaggcatttggcttgtttccgcctttgggctcttgcaaacggtgctcctacaaacgtgtgcacacatggatttctttgagcccccactgcagtctttttggagtgtgtgtctaggagcgagacggccgggttgtgtgatagttccatgtccaactttttgaggaactgccaccctgttttccagtggctgaactattttacatccaacaatgcacaagggttccaatgtttccacatcctcaccaacacctgctattttctggtttattttccttctgtggcctatgaagtggctgcctattacttgtgtagatatatggccttctgaagtccataaggcatgtgcagagggtggtggcatgttgcctctgtccatatggaaactgataagcaagaagtgaagtgcagggccctgtgtctaaccccagagcaggtgggcctgagacctggagctggcaggcagctggggtccccgtattcccacagagcgggcaggcaggtccctggagaccagtgccatggggtcaggctgggggatgggcactggtgagaggcggcagggggccagctctagggatgctgtctggcctctgagagacacccccccatccacccatttcttatcccagcacctctggcccctgttgatggggtcaagtggcctcagcctagaaggtgcagattggagggaggaatggaagtctcctggcatcttgggtggtatttggaatgcagacaatgcgaatggaaggatgtgttgtgatttcttttaggacaacaggtcctctccttatttcccgcctgctcctctccactgccactctccacccttcagctctgcacacctggacagtgaacagctgttcccgtgcctgctgcctcagctcagcatgcgtgtgcaatgctagacggccccctgcacacagtgtcctggccgcctggctgccttgggccaagggagtgtctcttgtggacggtcagtttcctctgggacataggttctcccctgcacagtcttagctgctcccagtcagtggcatctaccctgctgcgtttcaggctggttctcgtctccgtgcatcattctggctgcggcaggcagagttccaggtcagcacctggtgtacacacatctccaagttcttcagccaaacacaaaccgaggtgcagctgtgaggggattttgcggcaggggggcggtcattaaggacccaggtagggagtttatcaggtgggcctgacctaagcagatgagcctttgaaacacagagagttttctccagctggtcgcagaacaggaagccaggggattccacagtaaaagggatggggcaaaggggaacttctccactggtggcgtgaaagtggaggggtcccgtggtgaggaatgtgcatctgagcttctgactgacagaaaagtggccttcagaaaaatggtgttgcttaagcccctgagctggaggtgttttgttactcatcagtggcacatgcacgcccaggtcaggcggtgcctcctgcctcctgcttcctgagctctgcaatccctcctgcctcagttgctttgcaggctgctccgcttgactgccggccccaggaaggcaaggccccgccataccagctgctcacctgtggcaccagcaggtgcttgctcactgtaggctggggaacgagctggcacctgctcacacccctcccactctctgcaccacacggctgggctgggcatctggagacctgggctgagtgcagagaccccgctttctacttgtgcgatctctgccagctaccttgccattttgtgcctcagtttcctcctctgtaaaataaaaacagcaacaggaaccaccttgagcacatttttttcgtgccccggcaccaggcgctgtgccgacggagccgatgctgtcacgtaaccggatcaaatgttcccaggactttctgtgtgctgcttgcctgcgccctgctttctgggtgtgtgttccagcttctgaactatatcgaagggtcccaaaggcattttggggtgggggcacctcatggcacctcactgatctgctcacaccaaatgcaaaaaccaaaacccactgagactcattctggaattacctgcagttaccccaagcagccaggttgtctcggacccagggcctctgcacgcaccgtccctctgtgtggagcattcttccctggggagcgtgttcagccttggcctcagctccacgggctcctcctccacccttctcccacctcccctccaggtctccatcagttccctccttggggctgccctggccccaggcttccccttccatgccctccctctgtgctgtaagcccctgcctgccagcccgacttcggtccccacgcccccacctgcacagtggtgaggcaggaccagagcctcattcccttgtatgtccccagtctcccatggtgcctgacttgtagcagttgttcatgctgtgatccatgcatgcaatggttgttctagagcacccgtgttggacaagccaggccccagtcctcgtggagccctgggctagcactcaggggacgtttgctgaatgaatgaacaatgaaggctcatactggggccaattaaatggaaaatatggaacaatgtgtgtgcagcgtgtatgcacgtgttgtgtatatgtatgtgtggtgtatgcgagtgtgtagtatgtgtgcgtgtatgcacgtgtgtatatatgcctgtgggcatgatgtgtgttatataaatgtgtgtgcagcatgtatgcacatgttgtgtatatgtgtgtgtggtgtatgtgagtgtgtggtatgtgtgcgtgtagacgcatgcgtgtatatacgtatgtggggtggtgtgtgtatataaatgtgtgtggtgtatatgcacgtgttgtgcatgatctgtgtgtggtgtaagtgtgtatgcacatatgtgtatatgtgtgagggcatagtgtgtatgtgtgtcatgtatgcatgtgttgtgtgtgatatgtgtgagtgtatggtgtgtgtatggtatgtgtgcgtgtatgaacatgtgtgtatgtatgtgggcatgtgtatataaatgtgtgtggtgtgtatgcacatgttgtgatatgtgtggtgtgtatgcacatgtgtgtatgtgtgaaggcatggtggtatgggtgtgagtgaatgtgtgtgaggtgtatacatgtgtgtgatatgtgtgagcgtattgtgtatgtgtgtgcacatatgcacatatgtatacatgtatgagggtatggtgtgtatgaatgcattgtgttgtgtatgcatgtgttgtatgtgatatgtgtgtgctgtgtggtatgtgtgtgtatgcacgtgtgtatatatgtgtgaaggcatggtgttatgtgtgtgtgaatgtgtgcatgtatgcatgtgttgtgtgtgatatgtgtgagtgtatggtatatgtgtatatgtgtgtatgcacatatgtgtatgtgtgagggcatggtgcatatgtataaatgtgtgtggtgtgtatccacgtgttgtgatgtctgtgtggtgtatgtgtgtggtgtatgtgtgtgtgcctctatgcatgtgtgtgtatatatgtgagggcatggtgcgtgtgtgtatgaatgtatgtgtggtgtgtatgcacgtgttgtgtatgtgtgtggcatgatccccacccacagtaaaggggtgactaccactctctgaccctgagcccctctctgttcaaccctccagcctcccttctgctctctgacagccagaggaaccagcctgcttctgccctgtctccgtccatctctcctaagaaggaaaattgggcattttcccaaaaggttctgctggtttaaaagcagggagggggaaagggggaactgcctgcaaatgtcacttgcagatgaaatttctgaaatgcaagagagaccaaaacagaaacctcaaatcagcccagacccagcctcaagagggcaggccggggcacccctcccctgcagtgcccatttctgtgccagccaagaaactgctctggttacaaaggctgcactttctcaatttccgtgacttagactccaaattatcccaaaggcaggatgtggagtctctgagtggaagaatgaccattcacctggctctccttccagaacctgctgcatccagaggctttctgaatttccatggatgtggggaggagccacaacacaaaagtgacacctgggctactggggccccccacaaacagcagggaatccctggagccacagcatccccgctcccacccaggaggctcaggccgtgagctcttctcttcccgtggccacacttcatcagggagcaggtttccacctggagcgtggagactctgaagccagtgggaaggaggctctgggcacaggcagcgttgcagccccagtgagagatccttctgcaggtgcacacctgggcgatgggcagaggggagggggctggaaggcagcccgaggagcagcaggccgcgagcccacagggtccaggaagagctcgcacctgggcacccagcccgggccatccttctgcggcctggccagcagccatgtgcactggctgccacagggcaggcggctgccatcccatctgcacctcagctggggcctgggttctgtgccaagtggtccctaccagcctcatacaggcgggtagtggtgccctaggcaggtggcgtgggctctgggggtaggagagggggcatgtagggggctgtgaagctgtgtctcaggggcagcaggggcaggacaggaccaggcagaggggacccagctgggtttgggcagctggaaggaaactccccaccagctcggctggcctcggccttgttattctacccaggatccacaaagcccccagaagaggctcaggcaggttctcaagggccctcctggagtccccttcagggccacactcctgtccatatcagggacttgcggcagcattttctaatacaatgcaaatcaacaattgccttgctgaagaacaaggggtaaaaaaaatcactgtaaacaaagtctccgttgccatggagactattaaaaatagattggccaccctacccccttccttctgggtaatgtacagcgagttccttcacaccacattattattactttttaattatgaataatttcctcctttccataggaagatggattaacacacacaacttccccacaaagcccctcagcgtgtatttccatatgcaaatgcggcgggacggtgccccgtgtgtccaggccccagggcgaaagctccccgtgaatcccttccacctctcctggtctccctgcactctcagcttcctaagcctgtgtctgactgtccgtctggctgtctgttcgcctgcctgcctgctccaggctgcggactcagaaacagtaaagacaggtctgggaggtccggcctggcagagctaaggaactgctgtgtggggtaagcagcagacccccaagaggatgggcacctgggaagacagcgtgcccacgggaggactgaacagcctctgcactcccgctggcgcgaacaggctctggtgaaaagatgggctttgtagctccttgctgacatctttccattcagtcgggaggaaccatgcagcaaccccctggcagtgggtctgggacagagcccgaggtggcgggagccagggcagcgggaggggccgtcgcagtccagctcccgttcccagagggctcctgagcctctgaggtccccagctgccaaagcacaggtctgttccccagggcagcctccccagctcatcgccacggtccacatgcggacaaagactcacaccaatcccagggccaccaggctgcaatttcatcacggggttctgagtctggggagttcaagtgacttctgagaccacttgggggtgcaatctgcccggtgccacctacgaggaccgcctttgccgaggtacctgggccgaggcccagcaatacctggtagaatctttgtattcgtttaagcccagatgagttccaaagagccagtccctggcacacagactctcacctttaggaggctgcccatggctggaccctgagtgatccccacatgaagtgtggggctaaatactccaaggtccattttttgatcctgggggtcagagtacctcccctcccccacccagggagaagggggcactgtgcacccctgaggccgaccctagcggctgtggaagagctaaggaaacttggaagccctggacatctcggctcttgtatttcagcacggcagacgcagatggaggagagagaaactccctcctctggtggtgtgtgcatgcaggcagccccaagctttccaaagccactctgccggctcctggggccaccagggcgggcagctagatggccaagtggcaggacagtcacacaattgcatgcggctcagttacgatgggcacacagggagcaggtcctcggagggaggggctggggcggagtcggctccctgcctgacgtttaggtgaaactcttctttcatctgggccctgggggaggcagagtctgtgtgggtcataaggaggggtctctgcaaatggcagcctgcatgtgctggggctgtggaggaagggagagggactgcaggggtctctgagcatgccgcagaccccaggggagcccacacactggagcaggcccctcccacctcctcacctgcagacgcccccagactctgagagtctctgctcccctctccactgacatgggccccagaattccaggaggaggctggaaaaggccatgcctgcgctgcctccttctgccgccgcctcttcctctcgcctgcactccagggtccatgtggtgcaacggagtccttccagcacccccaggcagggcagggctgcccacaggtgcccccacaaggccaagggctgccacctgcacggacaggtctcagctcacctgggagggccaaaggacagctggaatcctccccgggagcagctggaatcacctgcaaccctcggtcaaggagtggacctgggagcagttactgcacccagagctccctccctcttctggtctgaggtgctttggccatggcccctgccaaaccagcccttcctgctctgcccaccgccaagcccaaagcctcctccctagcagacccgccagctctcctgctaggcatagtatagggcaaggatagcaccacagtccccattctcactgtcagcccccactatccatcaaggacgcccaatggttccaggatccaagacagcgacgtggcccagcacttctggtgtggcccctgcgatggcgtgaccagagagagcgaagacacttgctctcccacgggggccagcaggtgaaccctggggccaatcccagtagcctcctgtggggagagaagctgcaggagaagtggaggccggccctcccccgcacccacccctccaggttgggatggggctgccactcaggcttcagcagccccttggatctatctgcctcgattgctgaccccttggtactgacaagcgcagctggctgttttgtgacctttagaatctaaagcaacacaaatagagcagcccccttgccatgaaagtctgcagggcaaactgtgggcccaggggatgtgctgttttggggatgcggctctccctcctgctggctgcacctggctggcaggttgggcaggacccatgttccttacccgcatccgaggaataccacagttgcctggtaagccccaggccccttggcatggtttgcagcagggttcgcatggcagggagtggaaaggcggccccaccctgtccctgccgctctccccagctctgcataaggggcacatctctcctggcagggtggaaggggcagccaggtgttctgccaggatggcaggaaaggggagaagtggctgtgactgtgcctatgtcatctgcacagcctgggggagaggagagaagataacagaggcagagaagcttctccttgctccccgtaagagtctctcagcccctcagcctctcccaaaacccctggtcagaggcagaatactcactcctgctcaggggtgcctcagctgaagctctcaggaaagaaggggcctggctctgcagttcttgaggacatcagagaggacacccctggccctgtcacaatcccttccagagagcaccagcggcctggcttgtccctggatgttgaaaagtagctgttccccacggcctttctttctcagaggaacatgcccaaccaggcagggaagagtcctgactacaagccaatgggctgcccgacacccataaggatggctgctatcaaaagcacagaaaataacaaggcattggcgagggtgtggggaagttgcaaccctcatgcattgctggtgggaatggaagatggcgccgctgctgcggaaaaggaaggtttggcggttccttaaacaatcagatggaattgccatatggtcagcaaccctgctcctgggtacagccccaagagaactgagagccgcaactccaactgagaagtgcacttcgtgttcacggcagcatcactctcaatagccacacggggcggcagcccagtgtccacggatggacgaatggagaaacagaacatgctccatgcatagagggaatatgaccagccttacaatgggaggaaattctgacacacacaacatgggagaaccctggggacatgacgctgagtgaagtaagctggtcacaacaggacaaatcctgtgtgagtccactcatgtgaggtccttagagtcatcagattcagagacagaaaggagaatggagatgccaggggctggggagataggaagggggcttcgtgtttcctggggacagagcttcaggttagaaagatgagaacattctggagatggatggtgatggccgcacaacaagatgaatgtacttaatgccactgaacagtgcacttaaaaatggttaagatggtacattttatgttatgcatattttaccacaacgacaaaaagttttttccaatcgcagggatgtatgtgttccatccagctgcctagtcctccctccttgcacacccacccatgcacacgcgtgcacacacgtttcccacactaaaagttggccacgttcttcctacagcaaaagaaaggtacctgcccccaattttccctccactagataatctccttgaacaatttcataaagaaggattcacaccgtgccacgcgagaaagccgtgtgtgtcagccaagagcctgcggcctctggccaagagcaagaagaaaggcacagacatagatgcccagacatgtgaaggtggtcagtcgtggggccaagtctcagggcagcatcccagctcagggatgcttcttggcaaggaggtctgggagaaaatcaggaagtggcagactaagaccaagacagagagggatggatgtggctgtgccaagtgccctggcatcccccaagtctgggtggcaaatccactctccttagacttgctgcttgagaaggaggtttgggagaggaattccttcccaaaaagtgagggaggacatggcacggaagacccagccccttcccatgcagcctggtaccaggcagtaggtttgaggagatggcacccttgtctgtgctagctcagactgggtcaccacccagctacaaatgtatccttatttaatctatagcaattatattcacattctgctagacaaatagattttacaagccctcagttaaatgtggataattacgtctgctggtgtcaagggaccgtatcgtccaagctcaggaggaagcgtggcatcctgagtcctcctaatgctgtaaattagcaggcaacattcccatggcagctaagcaattatccatgatttcatttttccccacgccccctcctcacctctgtgggctgcccggccatgcctgtgcacacatgtgtgtatggatgtttcaggcatacgtggctgggaatggctcatctgtctctcgagttgctaagatgccttttccccgtgagaggcctctccccatgttggggtgccacccactgctctgtgctctcctgtgccaacctttctcctgaaaatgtccatcatcagaggtgtttccagaaaaccaaagatgagccaacgcctcaccactgccaagacctacgtcttggcagggttcttgcagatgcaggaggtcaaacaggagcttcggaagtgcatagcaggcaacgaggaccacccagtgctcacaatggttgcctgtgtgcatgtacacacacgtgtgcacaaaattcagaggcgctcaggcgctccgaggttcacaaacgcctgcagctctgccacttttacacagggcaatcttggagaagccccttcatctccagacctcagcacgttcacctctaaacgggagaagtgatacccacctcccacctgcagtccccctcacaatgtggttgtgagatcatacgcaatgaaaaataggaaagcattttgaaacacacaaagcaccaatgaaatcaaaggcagggctgcttgtgtgagttctgggcgccctggtgtcttggcatcctctccaagagcagacttatgaatgctgtaagatggttaacaggggccgggcgcggtggctcatgcctgtaatcccagcactttgggaggccgaggcaggcagactgcctcagctcagaagtttgagaccagcttgggcaacacggtgaaacctcgtctctactaaaatacaaaaaattagccaggcatggcggcgtgttcctgtaatcccagctactcaggaggctgaggcaggagaatcgcttgaacctgggaggcggatgttgcagtgagctgagatcatgccactgcactctagcctgggcaacagagcaagactccgtctcatacacacacacacacacacacacacacacacacacacacacacacacaaaagatggttaacaggtgtgcctccttttaggcaaatctgatgtttaaaaaacacaaattggctggtgagtcactttacaaaaggtccctttaacgtggaaatggaaagtttctgagtgcatttcaaatctactgccatttttaaaaatacttgtttatctacaagtttctcagaacatatgtgcagcaccaagtcagggactcccaattagaacgcccccacccacgaagggagcatgggaggaaagtgtgagtcagcggccccagggctgctgggcggagtcctctgccagccagcctgctagagtcccctgggaccttctccctccacagccatgtccaggctctgtccagcacctaggtctgcccccatcccaacccaggagaaggggtccacattctcacaggggtctccatggcaccactgttagcaggcagggcaggcctaggggagggaagtgcacgggaaccgcttgcctcccagccactgctctgcagctgaagagctcggccacccgaggggagggtggaggaaagaggccttgctgtgaggaatctcacccctgccacaggagggtcaggcctctgccctcagcttctaggacaggatgtctaagcccctggaacggcttactgatgagtgtctttatttactcagggtcttcgtctagccaggaagtaacaatgtgatgtgggggctggtctggggtctcacgggatcagctgacctctagaaagcctggagactcaggtcagccatgtacacctcccaagccgccatgatgaagctggtgaagactcgggcatggaggcccaggggcttccctgctgagtgagcctcccctggtgggttgaggggcttccctactgggtgagcctccccaggtgggtcgagggccttccctgctgggtgagcctccccaggtgctgtcaaacatcagtgccaggaagatgacaccgtcctggcttcacagcagagggcaggatgctccgtgccctaacctacaggcctccatgccctaacctccgcggccgcttctctcagctggttccaccctgtgtcttttagctgtaatgaaccctgagcgtgagaaccatgactgctgggctccgaggtcctctagcaaacaaccgggcctgagagtggttctggaagcctctacgcttgaggctggtgtcagaagtggggctgcttgaagtggatggccccctcaatgtggaaggaggctgggcctggctgcctgccaagcctaggggcctctccagagcccacggaccacagccactggcaggacagcagctctcagcccctccccctgaagaaagcatgtggggagggacagggcccagggcctcacctggacaggaggcgaggctcaaatgacccatgctggcattgggtgacaggagggggccccagaagttgaggacacaaggaacatggacccctgaccagggcatgcgggaccccaggggcacaccgaacgcggtcaccataggaccaaacaagatgaccataggaccaagcaagatgacgcaggcccctggcaagcctgaggccggggcagcagccatgctctctcctcctgtggtggggaggtctccttgaggccttgggacaagggcagagagagagaaggggaaggaagtgatcaggtgccggaaggccccgtgagggtggcccacgaggctcatgggttccaggaacccacgccccaccccaagctgcccggtcctcagcaactggccccatgttccacaggctcagcagctcccaacagaattctaggtgctgcccggacgagatgaggagggggacttgccggctgctggcttccagcctcatggggtacagaggcacccagggaggggcagagaggggagaagagcattgaaggggctgagagaggcgggacttggagcctggggagaagggtgtgggccggggaggagaggagaggtcctgagaaggccctctgatgatagctgctctggagaggcagaagggagacagggaaacagggggagccatgtgcagacagcagttgggacgggcacgcggggagggctggcccccgacagcggcagcacagcctcgtcttcctggtaaatcatcctatggcctcgctggcaactgtgaccaagatgcccaacccccctccccacacattcaacccctccctccgtcctgtgctgccacagcacccccactgcctccctgtgcccggccctccactcccaggccggtgcctccaggaagcccagggggtcacctgcccgagccggctgctgccctctgtgtttcacccagggcttcccggcccaggctgcctcctctgtcctcccgctccctacacaccccttcatttgcggaagccgccaggcagacactcggtctgggcaaggcccagggtccagcagcctcaggctgggcggggccaggctgggcagatgctgggtcgtcaccccggcagtgctcctctctgcctgggcgcagtggcgggaacccggggtgcaccctggctcttctccatcaccacctgttagggtctaaattgtgccccctccccaacttcatatgttgcagccctgacccccctgtgtagctgcatttggaggtggagcctataagtaggttattaaggttcagtgaagtcacagggaccctcatcggatgggattgatgcccttacaggaagagacagcagggcgatatgcactctctcttcctctccctgtctccctctctgtgtttctgtctgtctctctccaggggtgcacagaaaaggccacgtgaggtcgcagggagaaggcggcatctacaccagaaagagtcctcacaggcacgggacaggccggcccctgcgacgggacttcgggtgccccgtgtgccacgaactcccctctttctgcctccagccccagtctccttccagactccagactcttgggtccagtggccaactagtcacccccaccagagttttcaaacgtgtcttggcgtcacatgtccaaaaccaaactcctcacgtcctgcggtctccccgtggaagccccatctttccaggttcccaggtacaagttcgtggcattgtcctggattccttgaccgtcctcgccacgcccccatcgaccaggatgccaggagccaggatgattctgctttcaatgcttgtgcagatcctgccgcacagaccccaaccctacctccagtgtggtccggcgccaccacctctgccggacgtttgctatctctctacctccgtgcccagcccccggctattctcagcacagcagccaaagagattcctttaaaatagaagtcacatcctgccagcgctgccggtacccagcacctggggttctccgctatctcccacacatcgttctcaaacgccgccacctctccacgctggacactgccccctgtgcaaacgcagcccccaccccttcgtcccatttgctttttcccaggaatgcctgcccccccgaccaccccgtgcccacagacaaggtcagctcaatacatacttgttcaaggaacggacaaggaacaagcccagtggagtcgctgctgggcagggctgcccatcagcaaatccccttgcaacttctccatcgtccacgaggctcttggtgaccccatcccggatgcccagtccaggcgcacactcagtcatgtgctacccagagcacgccacatgccctcagctccctgaggcctttgcagccactatgccctctacacggaatggctccctcttgtcctctcttggcaagggccagccagcctgcagccctagcccaggcaccccttcatccaaggagacctccctgcccctcagtccgagtcaggagccccttctgtgggcgccctctaggcaccctcactcaccccataccagggtgctgcacagccttcagccctccctgtctcctgctcacagcagaagctccctgcagccaggggcgggtcttattcacccctctccccaagtgcagagcggaatcctccaggcaagtacatcatgtgaggaatgaacacacagtaggggctctcccagcacaggtggcgtgggaatcatagcctgtccgggcctcccgcccgtcccaggagcacaggggtgagcgtctctccctcggcactgaccaggggatggacaaggaagtccacagccaggaagcccctgcccccagaagtgaagctggggcttggcaggaaagaacagccagccaggctggcggagcctgccctaaggtccctccgctccccccgcaactgagctctcgactctcagcagccatgggccctgccacctgccagccatgctcttcctgtgaaattctctccagctggagtcaccactggcctggggcttcttcctgtctccagggtggtgcccactgagtctccttgactaggaccaccccctcccccaccaggcttccaagggctcggtccagccctggctctcctctcccctctggcctcaggcaggtctgtggctcaggaggacctgctgacaacagccatagtcttccccctcgggccgggccggagctccagctgccacctcatgtccttcctggggtcatcccttgggatcctcaaacctggcctgcctggacggatgctggtgtcccctgactcgccccatctctgctcctggaaggcagcccctacccatttagtcaccaaagcccctccccaccatggtcaactgtctgcaagttcccagagggagacacatttccctgtggcctctgctgtgctctgacaccctgggccagccccaccctgtcgcccgatggcttgctgtttaacatgtatcaggtgacactcacgccctgctaacccctccacaagcctcctggttttagaaaataaaatctgtgctccttacccaaggcctgttatgccccaccctcctctctcacctcctcttgctacactaaaccctccaggagcatgggtttctgtcagcttctagaacatacccagatccttctgcccaggccaccgcaccctgcaaaccccccttcctggagcaccctcgtccagacctaactccttcctggctggttctcatccctgaggcctcagctccctctgagtgccctgagcaagtcccctccgcagtaaccctctgcagtggggagggcctgggggggcttgtgtggccccagtgctcactgggaacccacagtgtgtagccaagcagggagtcaaccccctggggccccaactgcctgcactccccagaggaaggaggcacctcccacccggactggagccgtgtccacagctgccaaggatggtgccctaaaagattctcacttccttcagaggggcaaagcctgagatatctgggagacccaacaggacacagcagaggccatgggggtaaataaagagggagtttccaaggtagaccctgctgagctgtgcacttgggatcaaccttggggcggcactcacagccaagagatggacagagcaaggaagggggagaagacaggagggccacgaattccgacttagaaggcggcaagagcagagggagcagtgaagggacagagcgggagattgggggcccgggggttccgaaagacactggacagttgcagtggagatggggagggcaggaggagaggatggggggaggagaggacaaggaatggtgagggcagagacccccttccagggatcttgctgcaaagaggggcgggcaccaggcctgcgcctgggaaggtggtgcgaggcgagggctctctctgcaatgggaagacagacgcggtgaccagtgtaacactggaggaatcacggagagtgtggagggggagagagcaaggctgcgggactcatggcctggagctggggaggagagggagacacagcccacaagcagaaccaggggcttttggcaagagtgagtcagggggcatgggtgctggtggcctgggtttgaggagagagaggagcagaagagctggctggggtgtgaggactttcaggttccccaggtcgtggggcccacctttccggcagcatcccagtcctttgtcccacttgtcccatgcaggcaaggcccagaggggaggcagacagtcgaggatggctgtcgcaggtgctgggagaggaggtgttctcgtgaatgcgccatgtctttcttgctcgaacagtaaataaaacctcagggtcaggggaacaacccacattctaaactggcatccctgagaggtgacaacaatgaagagacaacggcaggcaggccgggagcactcgcgacacagtgttctgtggttccaacaagactttccttccagccgatggggcaggcacctatcatcctcgttttaccggtgagggaactggagtccaaaagtgaactgatgaagcctcggtgtgaaccccagaacttccctagcccacagcttgacttacttgtccacaccccacctcatttccaaattttggaggggacagcacggctctatttactttggggtgtgtgttttttgtttgtttgtttgtttttttgctttgagacagaatttcactcttgttgcccaggctggagtgcagtggtgtgatcttagctcactggaacctacacctcccaggttcaagggattctcctgcctcagcctcccaagtagctgggattacaggcatgcaccaccatgcccgggtaattttgtatttttagtagagatggggtttcatcatgttggtcaggctggtctcgaactcctgacctcaggtgatccacccgcctcggcctcccaaattgctaggattacaggtgtgagccaccacacccagccccggagtcccttttcttagtttatttatctgcagaagcagggacctggctctgatgacctgcagaccctcagttcccgccaatcccgaagctctctacatcctcagttctccaggtatggtgctcggagcagtagctgtgcctcccctttagctggtaagagatgcggacggggggcccctgcccagacaggcccactcagaatctggatcccaatctgtccggggaagcagtgcggccagggaggctccattccacatcacccagcaccacctcagggaccctgctctagggaatggaggggctgaggctctaaggtcctgggagatgtcctttgaccctgttggtagaaaggtccctacacagttgggctggcgggaagcacccctgtctctgaggggcgactgcagggggccttcccgggctgtgcctgctccttgcaacactgatcctacaagatttcccacaaaccaggggagctgtgaggccgaatacgcttgggagctcagccagtgattttgccttgtggatgctcctgatgaacactgtcccattgaaggcaccaagaaagtatgggcagagcccactgcacttccttaacagcatttctcactcttaaccgtggagacccttgttaggacacagctaaggcccccgaagaaggatcctgttggggaaacatcctgagataggaagcacaatgagcagagaaggcagaggctcctcatagcacatccattcacaccatctgacaaaccccacctgcacacgcacagatgcgcacacacatatttgcaacatgcacaggcgtgcacacatgaacatacatgtacacatgcacatatgcacacatgaacacgtgtacacacgtccctgaggatgctttgtctcccagccacttcttttccaaagcagctgttgactgggccccgtgctcccagcagatggagctgggcctgctggttacggctggcacttcacctgacgtggccaccacaaaaccacggcatccccacactccctcctcctgtataactgaatgtccaggtcaacccctacactcagccttaagaaatgggcccacaaggcagccactgtgccgagacagactccgcctgcagcaatatcctcgctgtcctcgttccctctctctctgtcccttgaaggtgcctggtgcactgtaggtggctcctgggtgtggcaccagcacaaaccctcccatctccacagtcacagcctgaaggcacagtttccccggagcccctgcagtgaggggaggtgagggagggcaggtgccatgggggagctcgcggggcaggacggtctcctgcagacccaccctggtctgggagccactctccacctgcgtctgcccccgcccagccttcgcatccaggaacaagtccagggacacggtatcagggcagagccagctccactgatggggcctagagccctcttaggctggtctcaactttttacttgtccctaacacggggctgctgtcccctgaacatcaccacagccatgccaacccacaggtgacccacgggccttcctgctttcctctggttccctgagctgcacccacaaaaagcctccgacagcctcgggaggcagagatacggactgctctgatttcacagacgcccacgtccacacccctgctgatagaagccatggtggcagtgcctgtgacgctcacgtccccagcaggacgtggcctgtgacctccccagctcaggactgagggtaggtgacactccctgccccccggcttatgttctcagaactagcagtgaattactgatgggtaaccatcggtctaatttctgtctgtatgaatttaactgttctagggaccttgtataagtaaagtcatatagtatttgcacagtatattggagcttgcccttgctccatggacagagttcccggagtggctgactccctctttactccgggtcccccttccagtgcttccctcaccgactcttcccctgccagtgactcccccagagagactcttcccccttgagattctcccctacccagaaccttttcctgctgctgttgatgccaacaacacctctgccaaagcagccccaggtccacgtgctgtgcacacgtgtgcagaggcacacacgctcacacacggccgtggagcatgctccttgcagcctcttcagggacaccagcacagagctgggcgagaccttggaaaggcatccttgaccctctgtgaggagaggcagtggccagcgaccacacacccgcacagagcctcgtccaccctgaggggccctgggatggtcatgagtcccatccttgcccatatgggagaggaacagaggaaaccggaagaagaaacgcttgaagtccccaaatggggactggcaatgtggggtggcagcaggtgatgggaggagaagagatgcaggcagagagtgagtccagcaggctgggcaggaggagggaggccatgccgtggactgggccagggtttgtatatacagttgcctctcactcagtccctcactaagaagcccagtgtggtgccagctgcctgcagctgccgaggttgggtcctcaagggggcacctggggagcccaggggagcctgaggtcacacctgggccagttgagaggctgactctaattcccacagtcctgccacccagaaactaggagctccattttacagaagacaaaaccgaggccatgggaatcaatgactcgtcggggccacatgcttcctgagtgagatccaggatctgatgccagctgcgttgggctccagagcccaacatccctacatttgttcttcttttgggaggaaggggagggcttgcagcctttgttctataaattcgtggttctgctcaacttggggcctgtgcttgaggacctgactttggcctgggagtccttgacctctgcgaatccagaaaggaaagtgggtgagaggacaaaggatgcaagcccccagcacatcagagtccaggcagggggctgccgaggcgaggtgggggagcctggtgcttcacctagctccctggagacatcagcgcaccaacccagctctaggattgagtgatttcccccagcgttgcactcagaccacaggggccagccagccgtcgctttgaagacgacttcagagaaaaggtgtttgatttgaacaatagcccagtcacttcgagagccattgtttttacaatagcaagaaaaattcttaggagagtgaacctgtctaaaacatcttccaaataaataaataaataaataaataaataaataaataaagcagataagaaaaaaagtagaaaatagactcaaacataacatgcctgaaaatccttcaacacatccgtaaatggaaaacccctgcctacagttaaggaggcttcccaaactatagttcatttaactgtccttttaggagtctcttaatcagaaaggtgatttcagtatcaaatacgcttttgcaagtacttttgtttctaaagtataaatagtatgtgctttatactgtgctcgactaatattattattattgtttgagacagagtctcactgtgtcacccaggtggagtacagtggcgccatctcagctcactgcaaccaccgcctccgggttcaagcgattctcctgcctcagcctcctgagtagctgggattacaggtatgcagcaccacacccagctaatttttgtatttttagtagagatggggttttgccacgttggccaggttggtctcaaactcctgacctcagatgatccacccgcctcggcctcccaaagtgctgggattacaggcgtgagccaccacacccgccctgtgctcagcaaatattgtttcttatctgccaaaagactgtcataagatcactgggcataaagtgaaaacagacacgctcagagccccatgttcagtttgctgcctgtggacatcaatttcaccagaaagcatgtctgataggtgccgaagattggaaattcattgatctctgtggccagaagaacaacttcaagtttcccggatcaaaccagagaatcattccttacagttaagtctaaaaacatgaggtcaagcccgatcggtgatcatgggtattgcacatgaaaaggatcggggaatccagggcccagctgaggaacacgaaggtgtgaaatggaaaccttaaacacgcggtctgttctcactgcagtggttatgttccacaaagacctctcagacactgactttacaaatactgaaccattgttcctaggggaaacacatggttaggttcccaagagcctctgaccacattttctttttttgagacggagtttcactcttgtccccaaggcttgagtgcaacgatgcaatcttggctcacggcaacctccatctcccgggttcaaacgattctcctgcctcagcctcctgagtagctggaattacaggtgccccccaccccccaccatgcctggctaattttttttttttttttgagatggattctcactctgtcatcaagctggagagcagtggcaccatctcggctcactgcaacctctgcctcctgggttcaagtgattctcctgcctcagcctcctgagtagctgggattacaggcatatgccaccatgcctagctaatttttgtatctttagtagagacagggtttcaccatgttggccaggctggtctcgaactcctgacctcaggtgatcctcctgcctcggcctcccaaagtgctgggattataggcgtgagccacagcgcccggcccacattttcatcaactgaacaaacatatctctgaaccattactatcttgagtgtacagtcagtggcattcggaacatttgctttgctgtccagccatcgccaccttccatctccagaatgcttttatcttcccaaactgaaattctgtcctcattaaacactaactccccaatcattctctctcaggccctggtaaacaccgacgtaatttctgtctctatgaatgtaaccattctagggacctcatctaagtcatacagtgcttgtgcttttaggtctggcttctcttacggaggcatcacgttttctggcttcattcacactgtgtattctgtgtcaggatttccttccttttcaaggctgagtaatattctctggcatggacagaccacattttgtttctccattcatctgtggctggacgcttgggttttccacctcttggctcttgtgaataacgctactatgaaccgagtgtgcacatgtctcgtccataccctgcttccaaccctgttgggtgtatacccagaagtggggttgctgggagagtcttttaaaagattgtttcatagaaacaagcatctccatggagcttcacctcttgggccaggcggcaaaagccagcttggctcatggaggagctaaccatacccacatcagtcacctgggttggtgggacatctgcaaatgccactggaaacacgtgttcacttcccaagggtcgcgagcagccttttatttgtgtgcaacctgtttcgttaaaaaaaaatctgcctcatttgtttgaagtgtaaacaaaggacaattaattaatttgttaattattcttccgtccttctcatgcacactggtatcaaaggccctgtgtcccagatgtgaagggaacgggttcatttactgatgagaaaccagggagatgccctaaggcagacaaaggggaaaaaaaaaaaagctaacgtggtacaagctttcagaaaaggagacaacgtaattggaatgatcctagaaattctgcaagctcctcttcttagtattcttagtaaaacaagtgggtctgtaggacaagtgccacagctcgcgaggctgggtccctgaagatcggtgctttacacttaacttggtgacagcgtgaaagacgtccttaagtaaaacgtttagaatccggtcgctctcctccctcttctcttgctccccctaccccagcattaattaactagtctcattttctctccctctcccagcacagactccaggttacatcttcatcctgctggtgttggtgtggttggcaagcttgcctgtgtcaccaccaacaccaatgggacacagacgtctctgcagggagacacggtcactcagacgctcagggccaggagggtccaggtgccatcaggaaaatggtgtgagtcaccccactcgcatcctctgttcccagggccaccttgggagaggtcccgccctggtctctgggccagggctccctcaccacagtcctacccctactctagctacccaggttttaggccagttgacctggacatcctgcccatacctctgtcttttaagcagatacaaaatctaagtgtgggagagggggcactgttcccacttctgtcatgtgactttgtactcctcccatggaagcaagtgtattactccaccctgtgacattgtgcttggctggctggctggcttttaccaacagaatgtgagcagacaatgtacacacaggctccgaatgtacttatgcagctgggcttggcctcttggacctctgtcgtggctgggagaagaacctcccttgggagctgctgcccctggacccagccgattccacgtgagcaggactgagccacgcccagctggctcacagcttgaagcagctgcagcacccagcccagcccagcccagcccagcccacactgacctgcagaccccacgagcaaggtgcggttgcttcttgacatttgccatggttatgttctatcaagtcaccgtccacactggattagccaatactaaaccaagggctcccggggaaatacatggctaagttcctgcaagcttctggtcgcaaaagtttcatcggtcaatcagtacctaaccttgttttaagggtgtttctatttaaagacactgtatttcatatatactgttgatttgttaacattgaactcacggctaacagcactagaggaagcacctctaattttctccataagacacgtcacagcctcctggcgctcaggaacactggacagctgtgttgcacggggctccagcgcccttttaaacagtgaaccccccaacggaaagcacaaaaacgtgaagaacatcgcactaagcaggtctcagaaaggacgctttgtagtgtgagagctgaggctggaaggccttgtttgacctcagctgggaccacatgcatctggctactgcaatttttttgctgctctgcacaggtgcaggaagaattatgaaagcacctttaatcttgattttggggtcacaaataaattttagcaagtagatgaatttgcaaatacagaatcctcaaataatgagcatcgactgtaaatgtttgaagccatggacttatggggccgtttgttacgcagcaagaactgacttacacatgatgaagacccagagaacccatgcccccaacttccaaggaggaggagtctggaagtgttggaaacacctgggtaggctgaagtccatgaagcgagttgggattctctttatcctatgacagcataaaaatcccagtgttcacatcacagtgggaaataaaagcctactgtctctctttcaggcaacatgcctctcttgaaccccaacacattctaggtgagttgcatctagctgtgtgattttgtataggggatttagccaagggagcaagcaggcccagacaattgtgcattgtacttagggaagagaggattcaattcatagtacttcaaaatcctgactctgaacttcagagaaagctgtgttttactcaggttcattaatggggagagaactttttctctggagatggactccggggctacggggaatcaggtgatggccaagcatggctgggaccctgaagaatggggtgacagtgctcaaagaatgactgtgctccaagcaggctcctgtccaagcaggtgaaaatgcaagttctaagtaaaaaacgtgtgtgaatccgtgcaaagaaaacaccaaggaaggtaacatcacgaaaaatacaagtttctcctctgcaaaacaaaaagacatgatttttgtggcccccaaagccttccccttttccttcaatctgggaccccaatatctggctctgctgggtgcgtcctggtgccagcgtgtctgccccccacctccgcagggtggacagtgagttgtgccctctgcctctggcctgcctgctggtcaccagaggaagctggttctcagtttggagtctctgtcccatggaatggcaccacatggaggttggagtgtaggctctggagccaggatccaggtctgccatggaataaaggtacctgcttatgctttaaaggggggagaaggaagaaagctcatgccctgagtgtcccccacatgtggctgtccacaggctgccagagctgattccaacacaggcttgtccccatgcaggatctgccgctgtgtggcaccccttgatcctggttcctgagcctacgctccaaacccatctctgtacccagctttacctttctgtagaaggagaatgagcacagtcaccacctcctccagggcgtttaggagtaaatgtgtcaacaggaggaaatccctgcaacagagcctggctcctggtaggcactgacaaacgttggtccccgggctcaggcccgggcccctgggccctccagccctgtgccccattcccctttgctggccaggtgctggcattcccattggtttgcatttgttagttcacagggtgtctccatgcaggtggttctttatcagtggtgtgtggcttatccacaacagccttccagtccccgatgtctcccagccaccttgcacatccccggccacctcctcccacactccagctctgtgtgctcggggaatgcaaagcaatcttaacattgttctaagtcaaacataattgggaaggtaaacctatagtgacaacagaatcacagactgcattccaaatccacagaaacggcactgggatctcagacgctccctgcagctgttttcaccgcccccatgagacctgcaacctgtgaaagagcagagggagcctcacttccccaggcccatgtgtggattcttcatgctggtgggtctacaccacagagcggggttctagaagaatgtcagcaaacacccccgggtaggcagccgctgggcatctgctgtgagtgggcactgtgcaaacgtacaggacatggggctgcccacaggatgcctggcttgggtggggcaggcagctccattggcagctgctctaaggcagtgctgggtaacagaccagggcaggggaaggtcattccgaaacacacatgcttgtgtgtgcacatacttgggtgcagctggacagaggggcatggccccgggtgcacctaagcatgagtacggttgaagcagaggccacatagaggtaccaaggcctggtgacagagggtagcctgaaagtccagccccatgggcgggacagggctagagggcagctggagagctggcagagcccaggacacccgggaggagctgagcctgcaggccaccaggagcaggtggaagagcaataggcagatagatagatgtggggatgggaggcaggcagcagtacgtgcctgggcctggagggaccagatgattaggaggccagggagctcctgcctaagccctggaacaaaggcgcctgcttatgttttaaagggggaagaaagaagaaagctcaggacctgagtgtttcccacaggtggctatccacaggctgccagagccgattccaacgcagccctgtctctatgcaggatccaaggcccaaggcactgggacctcaccagcctcagagccagggagcccagggttcatttttgacaaaaaactgccacccaccccctccacttggcccctggtgatgctttgacctctccggggagctggggcaggaggaggggtgctgtggccagagccgccatcttctgtcctgggaagcactctgttagagatgggggcccagagagtggagtctcaactgaggctgaataatttcaatcagcctacaggccgccccgattcccttctccaacagggacctttgagtgctcaggagggtctctggggtctgcctttgagcctccgctttctctcctctggattccccatgctgacctcatcgccaggcctgagggtctcaccccccaggagcccccctggggtctggggccgccccatccccaagccccagaggttggctggtgcctccactgctgccggctggccctgactgacagctgcccatgcaaatattgtccgttccaagctccagccggggaggccgggtccccctgcccacccgctcctcctggagctcctccagaaccttgaagagatgactcaataaatgacgagcccagggaggtgcgggaaagcccatagcacctctgagctgagctgcctgtcaccgtcactgccactctgtgacaccagccccactccaggctctgaggtcctggagggctgctggagagctggcagagcccgggacacccggtaggagctgggcccccaggccaccaggagcaggtggaggagcaacaggcagatagatccatgtggggatgggaggcagacagatccatgtggggatggagggctggtcttcaggagtctcctgggcaccccagagtcaggaaaccccattcccaaatgccaggctccccagacttcccaccctaggccggcatgaggccttggtcctgaaacctgtgtcatctcccaaagggtatttccagaaggcatctggctcctgcctgactgctctgccctttgggaatctggaaaaccatttgttctagtgcctgacatacatgcccttcccttcttcatgagcagacctggagaggcacatgccacacacatatactcatgtacatgcacacgcattcacacacagatacatgcatgcacagaggggcacaagcacaccatgcacacacatgcagacacaggtacacatgtacacagaggggcacaagcacactatgcacacacaggcatgcacacacaggtatacacaagcacacatgtatacatgcacacacacaggtgcacaggcgcacacacacacacacacacgtcaccaccagggctctaaatgcagctgcagtgaccttcatgttgttgaaaagaaaacctccttctgtgctgctggccagggtccctggcagctctccctgctctggcccctgagctcaggtcctaaccctgcaggcccagtaggggcaccgctagcgctgggttctatgtatcctactccctcttgcccagtccaaccagctcctccatgatagtaaacatgaagtaaaacccaccctgtttttcatggaaggatcaaggaggatctgtaagctactcttttccctcctctccaagatcaaatgatgagcttcagcctccagcatatggctcccaactcccaggtccatggctctgctctcctggatctctaaacgctgatctggctctcctggatcttgaacattcgccctcacgatagcggggcagccaggctgcacagcagtgggctcctttctctggggtcactccccgtctcctctcccctctaggaaagcctggcccagtaccacataggtgaagtcaggggctggctgggggtctccccaggggccagcaggggccgtgcctacaatcggactaggtcaggcctcatcagttcccgagggcactcacctgctttgcttggcttctcggccatgaccatcacctgcgtttcctctagaagggaggagtgcccccgagcaggagctgaggggagggatgaaatctggaagtcactgcctcagaactggtccatggcacggcagtaagagaaaatgagttctgggtgtgaaatccccgaagctcaatattttggtctgtccatacatggggcaggaagctggggaaatctcccttttctccctcctcccgaaaccatcagcttctttacaaattccccagctcccaagattttaattttacagttcacattttctcccggcagaatcccaggatgacgaggtagaaagtctgccctgattaactgtccctctggcgctgagcagggcccggcgtgataaatagcaggaataaaaccgagagaggcgcgcagcaagctgtcggcaggtctggccgtaaatcccagctctgatggggccgagatgagctgggggctttatggaggggaagagaggctgcttgcagagcagcaccccgctccccagcccctccccagccctcctgatgcccatgcagtggatatagtttaagtaagatagagcgaaatcgctctgttgtgtcattgatttttaataaaaacaggtaacgtactgcaaatctcactgtgatttcatctctcctcgcctttgcccagatgtcccgtaacctcccctaaaggctccatccaaacagcagtgaccatgactggtgtctggcaggcggtggactcaggattttgagaagtttccaggaggtctaggctgttttccctcttgacatacacacacattcacatacatttgcgtgaacacatctgtgcatacaggctcacaagatgtgtatgtcatgcacacactcagctcacacgcacactgcacacatgtatgtccatgcatgtgcaagcatgatcgcatgtgcacacgtgcctctgcacatgcacacacactcagtggcatacaccacacaccgtgcatatgcacatgtgtgcgtaagtgcaagtacatgcatgcacacacacatacatgcacacacacacataccagaccttcctggggagaggcacaagccaacactgagctctcctgctgacccaactctactctctggtgaccctgagtctgttatgaataatccagaacattccaggagtaggagaaggcacacatgtgcagacgggaaaataggagaggcgtcagagaaggaggacgcaggaatggcatcaagcggcaggggaggggagcgtccctgtcagactcatgaggctgcccgagcctcacacccgggccagagggcacttggggggatctgggctgagcggcaacgaggacatgggccaccagcgataaccaggcctcctcaggaggcctctgtcactttcaccagccttaccgaacagagataaagccgtgtctaatttgcagctgaagcaggcacactgtttacctgttatcagggttaatagcgtccgtctgagctgcagagacagcgctgtcctgcggacgggccgtgcttttccacggcatttcccatgtcccagggcatttttgaaaatggtggcttcctttagggtcacatttattgtcccctgtgactacagaggcaggtaccatcctccccatctgatgcaccaggggcccgagtgacttgcctgatctcctagccagctccctgccagctggggctccattggctatacctgggccggccgaagcccagaccaggggagccgaagccggtgaccacagggcagggagctccgtgacagcctctgccgacctctcccacagcagtgccctcttcagattttcctcattggccgtccccactggacttcatttttagccatggaatccacaactaaatcacctctggaccccggaccatgcccctcgcaccccaactgtgagaaagcctcacccgcaaggttgacctttgccctatggctctagttccccagcacaacctcctgccataccccccttccccatggccattagcccctccccaccagaggaagggcccccctgcaccccctcatcagcatccacacccctgctcctgaccacggcctcccttcacccagggtttgtccctcagaggcctcctggtcttccccacaccccatacgaggggacttggagctcttttcaggcccagccctcgcacggtgagtcggaaccagatcagagacatgcatagttgccgcacaggctggaaatgtcccgccagagctggcttgggcccaggggcagctttgcaggcaggtcacacacctgggggtgcagggagaggatgccgagtggatcaggaccccaggaaagggcgtcagcggaggcaaccagagacacagcggaaggatttgtggaaagagaaatcgcctggggcagggtcatcaggagagggaaataaacttggcccagagatgggtccaagcgtgagaaggagcaggtgtgacgagggtgggccaggctctaggccagggtcctgggcgtgcctccttcctcccggagcctcggcctgcaggggctcaatagtggcccctaagattcatgtcctcctggaacctgagaaggcaaccttgttggaaacagggtctttgcagatggaagtaaggtgcagatagagatgaggccatcctggattagggtgggccccaaatccaaggccagagagacaggagacacagaggcacacccagggaggtggccacgtgaagacagagcagagattggagagacgctgccttgagctgaggaatcccagggacagcggacagcccccagatctgggagagaggccagggacagattttccctccaagcctctggaaggagttagccctgccaataccttgatcttggacttccaacctccagaatggcagagagtccatttctgttgttttaagccccctagtgtgcggtcatcagttacagcaacccccagaaagcagtgctgcgtccttgcctgggaaatgagggtggagccccggcagaccccagggtgggtcttgggtgggaacacacactcgtggcccacaggcctcggccagccagggctgacgtggtgctggttcagccctggcccaggcaggtgcttagtgaggcaggtgaaatcaagggtctcactgaatcaaaacagatggccgtagagaaaggcagaccaacaggtcaggagcccgggccccgccttgaccttggaaatcctcctcaggtcccctgaggagccacttactctgggctccagccccaaacttctcagggaagcttccaagagcaaagatgctcttcaaaggccctggggtgaaagggacgtgttgggagacctgaccatccacggccctctcctctgtccctgctgagcctggcctgggagggaggggaaccccattcggcctccaaccacagctgctggggaccactggcagaagagagaggaggagggagggggagagagagagagagagagagagagagagagagagagagagagagagagagagagagagagagagagggagagagggagggagagagagggagagagagggagtgagggagggagagagagggagggagggagggaggaagagggggggagagagagagagagagagagagagagagagagagagagaaagagagacagagagagagagagagacaccaagcagggctgggtgagttgggtgtcagggtagtaaggagctcaccctgcaaggccccttgtggtgagaggcgtatggtaagagctccaaatggcggtggctgctgttgctgggatttcatgacaaaatgcagacacaaaggacaaacccagaggagggagccacctaggactctgctacaattgtgtgtttccacctagtacctgccgtgggggctgctggtgctccaacctcatttcccagagaggaccctgcactgcttccctggggctgccgtaactattaataattgccagaggaagctgcaggcagagccggaggggcagactggggtgggggtgaggaggggagagagggtgaggggaggacacctcccagaagaacccctcccaggaggacaggacctgaaggtttcttctctcagctcccgggtagaatcaggtccgtgcatgattccactccttgcttctggtctgaagctccccacagccacaatggaaaatctgactgacttggccttaaagaggtcccaggccatgaagcagcgcccagcagctcggcattggtcagaagcctccacctgcctggagaacccctggaaaacatccacctgtgccatgaggtcctcacaggccaaaggtgcacatggacgagacagtggtggcctctgcccctgtggacaaaaccggagctcagcctcccatgtcgcctccccaaccagccacctgggaacccgaggaagtcagatcagccgaaggggcccagcgtccagtccaatcctgggtgctgccaagtcccctctgccccaacaagctgctaggtgtgtgtcaccaggcctctgccaccggcctcgccacgggggagaccaggccaaggccttgccaaacacacactcacataaatgcagtcatgcttagacacacacaaatgcacactcacatacacccttgcctcttttttttttcttttgagacagtcttgctctgtcgcccaggctggagtgcagtggctcgatctcggctcgctgcaacctctgcctcccaggttccagtgattctccttgcctcagcctcttgagtagctgggattataggcacctgacaccactcccggctaatttttgtatttttagtagagatggggtttcaccatgttggccaggctggccacaaactcctgacctcaggtgatccacccgcctcggcctcccaaagtgctgggattacaggcatgagccaccgcaccctcttgttcactgtctcacatgtgcacacactcgttctcacatgctcacactacttgggatcgcagcctcttctcccttgtctaatgaccacactgtcccactgcctccctcggcccccgaccctttatttgctgagccccagagtgaccctctgggatgatggtgggaggggcaggctgcagagaactcagaatgccaacaaggagaacagaaatcctacagggtacccgtgacttactgggctatcccgagtgccgtgacacttcatctcatggtgcctgagacaggcactgccatccctcttcccatctcccaaaggaggaaactgaggcaggaagcaaagtcaaagctcataccctggcaggccctgctcacaaatgcacacctgtatgttcagggtggctacatggaggtcagtgaatcattagggggacagaatgtgggaaggatacattgagagggacaaggaaaccctggggatatggagagaaaagaaggccaaggagggggctgcagaccggacacccacttcaggtttgcccagcaccctcaggggtcagccaacttctgtgacctcagctgggggactgggagccccttgtgggttgggggccagcaagacccacccctcttatggcctgtgcgtctggctcaggtccactctcaggcaccctgagcccagtgaggttggaagcagctgggcatgcatcaccgaagaccagccgggggaagaaacctgagctcacagagcagatgggctgagcaacaccccatgaagtcttgagccagcccaaagcccacataggccggtgcctctgagccacagctccaaagccctctgtgcctgaccccagcctccctcaccaaacctctctccaccacttcctctgggcacccaaggctaccctggactcctctctgtcccctgatgtgacctggcttccagagtctccctcagacacttcccggactggcctttcacaagccctgggtctagatttgtgccttataagcccgcatttgctccaaactaaactgtgggctcttctcaacagcgtgcagtagagaagagcctacagtttagtcttgagcaaatatacattcagatatatatatagtcagttatatatatgcaaatatatatatgcagttatatattatatattcttccagaatatataaggaattacaactcaatctaattctagaacgttttcattgcaccaaaaagaaacccacacccattcacagtcactgcccatccccaaccacaggcaaccacagatttttctgttctggacatttcaggaaaatggagtcacacactctgtggccttatgtctgtgtctttcactgagcatgacgtcctcaaggttcatgtgtgttggagcctgtgtcaggtttcatgcttatttgtggctatataatattccactgcagggacagactccattttgtggaccttttcatcagtcgatagacattgagttgcttccacattttggctactgtgaatggcgctgctgggaacacgggtaggtgtgttcatggcagacatatgctttcatttctcttatgtatattagggagcacattttcttgtaagggggtcccactgcccagtgggaatgtcaggtgaagctcaggctgcaggagccaaggatgaaaaatgagtttctaaatgacagcggcctgggtgagggccttccacgtgcgggaggcactgcagggctctggggtcttagaggaggagactcgattctctaagaaacctcagccacaggcctcaggacccgcctcgatttccaggactgtctaccccagcccacaagcagagcaatttccagatcttcaagacaagcccacttccaggatcatctctccccacaccctcctcccctgtgatttcccttccttgctgtgccgagctcagagcccacaaaaagcatctgtctgcacagcctgctttcctgggggcaaagccggggaggcagaagagtccaagatggggcattccaaagcccaccccttcctcctccatgtgctcccagagtcacaagaagctgctcggctgggtgttgccctgttttattgctagaaccttctgattcagccggggtttgcaggacagtccccaaatcacttggccttgggaaggttttgcagagggcaggggctctctgagtctgactggtggacctagggcaggggccctccaaccaggggtgggtttgcccctggggccatttggtggtgcctgcagacatttccagttgtcacagctgtggctgggggtgatgctggcacatggcgagcggaaccagggatgctgctcatcctacaatgcaaggaacggcctccacatgagagaatggtcccccgacatgtcaacagtgctgaggtttagaaaccctgccctgaagggtaggggacctgggaggtgacagctcctctgaggctctgaactcctcacccagcatggtcggtcaagctgagagcacgctggccctagagatggtcaggagcctccagggccctggcgatgctgcctccatcattcccatactccaaggacacaggattccacacgtccaaaaattccagcagctcctctctctgctctaagcaggacatggctgcctttctcctccaggcagcaatgcggcagacccctggtcagacctcagggctgggaggagaggaatgattgtggtcatgcctggggtctcacataaactccctccacccctattgaggcaggaggtggaacttgactccagaggtgaggctcagacatcagaccaaactgaagactagccaagcaaacgggatggaagcagctctccctaagatatgcccactagcgtgccatgttagtgtaccattgctatggcaacgctcctgggcagcacccaggagtgactgcccatttccacggcaatgacccatgacccacaactcaccaccctttttctagaaatttctgcataacctgtctcttaatttgcatgcaattaaaagtgggtataaatctgactgcaaacctgccctgagctgccgctctcagcacacggcctatggggcagccctgctctgcaggggcagtcacggagctgcacacggcccatggggcagccctgctctgcaggggcagtcacggagctgccacgtcatcacagatgtaacaccacggcttcaataaagctgttttctcctaccattggcttgctgttgaattctttcctgagagaagccaaggactctcctgggctaagccccagtttggagtttgcctgccctgcaacacgagtacctgaggcacagccaaagcctaccttgggtgaggctggggcccgtgtcaacctgggcctcccttcaaatgcctccattctgtctcttgatattatctcaaaacaagcttggacgtgcagtccctgccttccatgtgtgcagcaaatgtgaatttgtcggcagtaaacatttcaaacagacctgaagttctgtaacccgctttcggcatgcctccatttttcagtcgaactggagcttcttctgccagtggatgcagcccaggtctctgccaccttctgagaggcccatgagcaaatctcagggctggagctctgagccgcagggaaattaaatgtgcagcctcatccatccagccacctcactgcacaaatggtcccacaaactgccactccccctccacagatgccgtgtttgctggcagagtgccggcttcatctggaaggttgtgcctaaccgagcaggcatgacttgcctgtgatagcctgtgacccgtctgtctattgtgtacggtgatacggtgcacagtcccattttacagaaggactaactgaggcacagagaagtcaagaagttgcccaagatgcagcacagggagggccaaggggctgaaattgaagactgtgcccaagcctgggcttaaagcaccatcctcactcccttgcctttaccttgtggggattttcttacaggcagttggggaaggatttggagggctccttctctctctgaagcttcatgccatccatgtgagcattgctcagcagagcaggctgtgggccgtgctgaggggcggccagggtgagccccaaaatgggtgatatggttcggctcatgtcgctacccaaatagcatgtcaaactgtaatccctaatattgggggagggacctggtgggaggtgattgaatcccaggggtagatttccctcttgttgttctcatgatagtgagtgagtttacacaagacccagttcgtttgaaagtgtgtagcacctcccccttcgctctctctcctgctgccatgtgaagacgtgcctgcttccccttcaccttccgccatgattggaagtttcctgaggcctcccagccacgcttctggtacaacctgtggaactgtgagtccattaaacctcttttcttcataaattacccagtctcaggtagtttttgataacagtgtgagaacagactaatacaatggttcaggagcccccagaagagggggtgggggtgtgagagtctggaaaactgggcagaagactctaaactgaaacctttggacactgtagtaggttaaattgtgtctcccaaaaagatgtgtccaagtcctaacctgggacctcaagctgtgaccttatctggaatgagggcctttgcagacaaatttaaggtaaggatctcaagatgaaatcatcctggattatgatgggccctaaatccagggatcagtgtcctcataagaaacagaagagaagaatgacacacagagaaggccacgtggagacagaggcagggactgcagcaatgcctctccaagccaaggaacacctggggccgagaagctggaggaggcaggatggaccctcccctgaagcctttggagggagcacagccctgcccacaccttgatttcaggcttgtggcctccagaaatgcaagacttcatgtctgctgttttaggcccccagaaagcggtcacttgttatatcagatgcaggtcactcatacagacatactcaaggactggggctaaggggcttcaacttgcaggagctcccagagcaggttcaacaccaggaatctggcctcgcaggctcagaagtaggccatctccctctccccacctggacggcagcccctgatgaagggaaaacagcccccagacccctcatgcaggttccctgacacagagaaaagggccagaaggatgtggctcccatggtgaatttggctcagagttgacgtcctgggcactagaagggtcactttgccagccacgctcccctgtggaccctcacgtctgcctgcctcggccactgggttggagctgctttgccaggttgggggtgcacaggtattagtcaagagcccagacccctcttcctgcctgtgcctgtagtcccttaccacagagaggagagggagagcaaacaaaacccctgaagctgagaggttcgggtaggaggggcccgggatgggtttctggcactgtgtgtttttttcagcttctatgaagaaaattaacaattacagtagaagctacatgaaacataagcagaggcctgtcactcacctctcttgcttcctgtgctaacccccgttaacccctttctgcccccacgatccttcctccctacagcctagaacacgggctgtccccaaactttctcccttacagttcccgggtccccctctcaacctgcctccaggtgagtctgcaaaatttcctgggctctccccaaagctcaccccagacaccctaatccaattcatccaacaaaaccattcagaagcctccaacaacttctactctgaaatattctagaattttgcataattgccaattaaggtcagttttcatcattcaattataggtgaatatactgatgtgcttatttgaaacctgcacacataaacacacacacacacacacacacacacactttgagtctggccacccgtagacccaatggagcatctctgctggtggacgttacattccggatgctggatggcaggtgaccccagctctgggggcgcacatacatggatgcaacctcttcacttctgcactaagaaaggagagtggtctgggcaggagaagactcaagggttaaagtcacgatgggcacaccattgtggtgggtggctggccccctcctggccattgttcagcagggtcagcatatttccatcttccagccagcccgctcgttaattaatcactcattaggctaatcacagctatctcgtttcccactaggggggaagatgttagcacagtggaatgccaaaaaagcccaaaatgcaactaatgggtctgtgtgaagaggcagaaagagagaccgtggaacgatgggacgtttctaacacctgacatacacacacacacatgcacacgcatgatgaaacagaagccatgtgtgtgcagaaactctctcaacatggatgccagactcaaggaggtcaaaagtcacccgtgggtgtacagacactgtggactgccctcccgccctcctgtaggcgagagttaagcagaaaggaaaagaggccatttccaatttcaattctaatcacttcccttctcaggctgtgaatgaaggcctggacttggaacaagagctactttggcagtaggaagaataaaacggggaaaaaacaccggagcctataggagcacctccctacagatgtgaagaggcaaatgccgaggtattggcacagatgtccccatcggagccatcctgggatggggactccaggaaaacgaatcaccccaaaattccaagaggaattacaagttcatccaaacacagaccaccctggacttctgatttttttttttatattatgatgggcttatcagggtattaaatatattttcaacttagcaataatttcaacttatggtgggtttgttggggtgtgacccatcataattccaggagcacctgtatatgggcctaaggaagaagaagacaagaacaactattagcaactcatcgtgatccaaagtgctacactactgaagatcaggaggacccctgtctggcaaggattcgacggagctcccagggtagcctgccaagaaaatagcactgtgcaaggtgctgtttgcatgcataacaatgataagactagtcccaaaagatatatgccaagaggagagaaaaagtaaaactctggctaaggaaacaaattcaagaagtaaaacctacttttagaaaagcacaaaatgagattttctaaatcagagctggcagccttcaattagaagggggtgcagcattctcatccgagagctctgactcccaagcccaggctggggggcccgatggctcacccaaggcagtgttttctgtccagaagtttccacccacaaatatgccaaacccttcctctcgcctgccttgcttcactgggacaatttgctatcgaaaggcacaattatcaggggacatatgatgtttaggagcatcatttggaagaagttatatctaaacacctgagtagtaaatgagaaaaaaaaatacattaggaaatttggttttaaatgttttatgctaatttattcggctcagtcaagtgcagtcaaccctgaacccccgggactgtcagtgtgggtgacaatcacaggcaaagacgtgccgggaagacgttgtcacctccgccgagctctgaacccagaagacaagcttgtcaacatctcagaagcatcatcttggggatagagaggaagctggggaagtctgttcaaatcttccctagagacaaatctcttcaccttgactgcagctcaactgttcagcctgaatcagggggtgaggcctgcccttgaattgcaactggcaggagggaaaatgacctactctcagatggggatcacctacgaaccatcacagtaagttaccctcaatgcaagaggcatccgtggagcacccacccctggtgaggaggcagcccaggctcaagccttggctctgacactcatgggcagggaggccctgggcaaaccactgggtcccccgcaaccttccatttcatcctctgaaaaacggtgacaataagcgtaccaacatcatcagatcatcatgagtactgaatgacagcatcgcagtgttcgtacgttaggtggggcctagtgcccaagggatcatacgtgcttcacgtctggagacgcttccacagaacaccttcccccacgcccacagcatccctgccacccagtactggcaccctcatccacacaaattacaggggggtaccaacacccgcagggctcttttgagtcctagagagcccagagggctttacgctatgttccctgtggctacaggggaggagaattcagctggcctagaaggatgggtagaattctgaatggttgaaattaaggagaaggaagttgctggaaggcatggggcagacggaagcatggaggtgggaactgctgaatgctgtgatctggcaggaacatgggatgtttgaggaggaaggcggaggtgagagtgtaggggctagctgggaactgaactttttagagagtaagactgggagctcagatgggcaatcggcagtgcaggatggaggcccaccctgtcaccacctccgctgcggaggaacgcagcagtcatggtggaagggaaggcggatgggcattctttgtgcacatgccttcgacgcagaaggcagagctccagcaagtcactgacgctccactgtcttgggacagatggatgctcagacatggacgtggtttatgattgtccaggttgaggctgttggctctttcttcttcagggagaccgtcccctgccctctggcttctggcatgcagcagcgaatgggtcattaaagatcaccttggaggtgggggagtgggaaagggaagttagggccatcaggggagaatggggtcacagagcggagaggggaggctccaggaagaaagaagccacacagcagggatgagggaggggaccactgggagagactcggacttggtggccacagcccctgccaactgctggagaagttggcatctccctgccatcagtggagaagcaggcccggcagggtcaggaaaggtgaaggagggcacagagagcttgcacaacccgggggcattgcagggaagaaacacccttggcaggctcagggcctttggaccaagaagccagtggagaggaagcagcaccgtggtgccatcccgctcacggccccccggccacctggaccacgtctcccctccaacacccactgagacgtgcagcttggagcacatggcttcatctctccaggtctcggtttacccatctgtggaatgggggtgatcgcagggcctccctcaggagattgctttgaggatcaaatgagcgaatttctgcagcagtcctcaacctgcagtcacggcagtgtgtcctttctgtaaacccgggatgaaatgctaatagccgtgtcattctacacatgctatgccggagctgaagagtgcgtgttggctctgcccagacccagcggccatgctggccacaccctaagtccagagcgatgcccagagaacaaaccactctaggccctctggggcagtggcttcatctcatttttgaaagggggagctgtgtggccagcagagatggccatagaagctggggcgtcgcagtggggcccctctcttcctcctggcggcagatggggaggctggccctgagtggccagctcagtggtcacagagggacaggcctcatctccttggcaccctttggggtggtggaagggaagctggtgggaggcagggatgtcacccagagtcccaggataacagaggggactggcaggccgcctgctgcagccccacagccccacaggggttatggagagaaatagtgccgtttaagagtgtgcagaagagtgggtgcggagatgtgtgggtatgtgcaggtgtggccaggcacatggggtgtgtgtgtagatgtgtgtgcagtgtgtgccggtgtgtgcagaggcatctctgggacaggactggggctggtgagcctcaccccagaggaccctgggggagagatcttctcccatgttctgccagctccctcaggtccccatgcaaagctgcagcctgacacgcaggcatgagggaggctctcgaaacagcttggctggcagaggagaggaaagggggctgactccatgcccaggagctgagttctgggatcccttggacacctctcagcccggggtggacagcaggccatgacctggggcggtgctaggtgccatgtgccccccatggtgagttgggaagcgtctttggtgacgtcctgtgtaggaaatgcgctctgacaaggggttgcacaggagggcacctctcagatgcgccaggggaggcaatgccgtctggagccctgccccatcacctctgctctgacccccatgccaacctggcacctcctcagccccttctgcacctctcccctgttctcagaagggtggccaggacccattccccacccagccgcatgccccaggcctgggcacatcattctggctcccagggccctcccttgaggcctctcctcagcatacccccaaatccagcttccagggagtccgaggctgcctacatctgtcctgccccagggccaggtggctctgtctgctgtatccctgcccagcccctcctgcccctcctggcctgccctctgcggaggcccagccccgccacctctctcatccaccaacctcacctctcctgggatcaagaacactgccgctcccccaccttgcccaccaagccctcccagcacccccaatctctagctatttgtaggtcctcctggcctgtccacagcaaaggggtccactcactcttggacccagtcaagaaagtccaaggaagaatttcataccgtccggccctgtgcattaccacacagggagaaatgggagtttggcaaggaatcaaaggcccagagaggttaagcgacctgtctggagtcacacagctcattaggcaaagacatctgacccaccttagggctcctgtggcccactccagaagcagccctatccacactgactggagcgacttggaagatgacatgagctgagccagggtctcatctgatggccccatgtggtgatgggcccactcccattgtagctcctcagtattcaaggcctggggtttgggggccctgcacccagaggcaggagatactgcctacctgcacccactcagactgggctgctacagagccagccacgtgcacgaggcccgacagcatcccccatggggtgtgtgcaggcctggcagcatcccctttatggggtgtgcacaggcccacagcaacccctccatggggtatgtgcacacaggctggacagcgtccccctccacggggtgtgcacaggcccggcagcatccccctccatgggatgtacatgggccccacttttcttgtatcttaaaaatgagccccataactggaggaagctggatgtgctactcccaggtcagcagccacaaaaggatccaaagacgcgcaggctaccgtgacgggggagcggagagggggagaggcaggccctgagcagtggcatctggggaggagaaattcggaaattgttggccaggaagaaaccgcaccacgcttctgcccaggagagaccacctgagggtcatccaggagggtcagtgttaactgaaggtgggaatcagatgagcccaggagagtggccatctgggtccagaaatggccaggcaggactccacgggagctgccaccacagagccccatggagatgccacggggcccgtgaaacctttgagcagaggccagggagggtgaaagggggaggccaggcacacgggtgtgtgcacacacacacacgcacgcagtcacacactcacatgcgcacacgttcagaggaacctatccacacacacattcattcacacacacacttccacaatcacattcacagacacacatgccaccacacactcgctcacagcatcagacggacgcagacattcacacattccacactcacactcatccacagagctgctgtcacacgcacagccacacacagccccatgctccacatgcacccttgacacctgcagcggcacctccagcctggcctcccccgagggccacccaggtgtccagtgctacgtggcgtctgcctctctcggacattgcactaaccaggtcccaccgcaagcctcaagaacatcacactgatgaggctccaccccaaacctcaagaacttcacactgacgaggctccaccccaaacctaaggacatcacactgaccaggtcccaccccaagccttaaggacattgtactgaccaggccccaccccaagcctaaaggacatcacactgacggggccccagcccaagcctgaaggacatcacactgacagggtcccaccccaagccttaatgtgctcccgagcctgttcctctctcacgcagtctttctttctgctactcaacctgaaaatctgggcatcatccttgctctgtcctcttctcctaaccctcgtcccgccaactctgtttgttccgcctcccactctgaccctgtctgtcccctccaggcaccatggacatctggggctgggtccttcttggtgggagcatcccgtgtgctgtaggatgtttactggcatccctgggtccccacccactggatgccaggggcagccccctccccagctgtgacaaccccagacattgccatgcatcccctgctggagagaacccgccccagaccaagccccagcccctctcacccaggctttgcgctgggttcccaaagggtctctctgcctctgacctagttccttctaaccatataccagaccattcttttaaaatattaatcggtgaatttcagagatgccatcattttataaagacactgttaaatgcatatttataccaggccagagcccctcctgagtcagacccccgggagttcccaccacacttgaattgattcaaaccccccagggcccttcagagcctgcctctgcccaccctggcccggccggctctctcggtctttcaaacacaagctcgagaggtctgggcacaagtcagtcccactgcctggaccagccctctactctctgtccccagccacccactcagcacagggctgcctcctcccatcctaaatcccccaagttgttctgtatcacagcacctgcccattcccatgggagtccttccaacagttagtcatgaattgtatgtgtgtgttataggcagaggtacaggcataggtatattgatagagaagataatgagataggttgacacagatgacacacacgtggcacaggtgtagacaggcagggtgaggtctacaggcaccctcctccccagggcatgggctcctgggggcatggctgccctacttcctggtcccctgagcagaaggcctgggcccatgtccagcatggagtagggccttgttagaatatttcagggttgatggtcggacggatgagggcctcatggcatggcctcgggtagcagtggaaaaggagctgttgtggagacacaggacacaggctggaatcaatagctctcaccatgtggtgtgtgccatcactcctcactggggtgttgaggggaggggttgctttaatatggctcatgaatgggggtacggcctttctaatctccgcaaatgtcatcgacttccagagatctgtgaaatcacccaaccaagacacgtggccgctaactccttctaacgcgccttcatgtcctgctcaacatcccagcggctcttcctgaagcccagggccagcagccccgtgtagatgccccgggacctccgtttccggggcagttggggcgccctctctccccaggacagtggcagtgtggcagcacagagcaacagctggtctctgctcccaaagagatgcagagaatgaatgcgtcctaggccagccaggccctggggctgtccccgcgatgtccctgcacacaacagccatgagatccctgccctcaggcagcgagtccagtgtggggaggtgcaggaaaacccttgagacccttcagtgcataaggaaacggaacgtgacctctaagagcagaggcgacttgaagaacacagcccagcacaacggcagaaagaaggtgttcaggaaagggtgtggcagtcaatggattcctccagaaaacacggtgggtggggagccagaggtccttgcatccagcagtcaggccacagcacaacctcacctgggccagggcagcagaaatccccaagtcccttgacctcgcaatcatgcaaccaggcccaggccatctttgcagggcgggggacccgggtgtgcctccccaggtgggtaacagagcaggcagttgggcagggaaggagcagggagaggtccgtctgccaggcccacatggtaggcaggcacgcagtgtctcgaagcagtcggcgcacacggttacccttaatgggactgcgctgcctgactcatatgctctgaatctgtcagggccttgtttttgttttttgttgggaaataattacggattcactagaaggggcagagaaatgtacaggtgcctcgcacccttcactcagctccccgcaatgttgacgtctcacgtaaccaccatgcaaccaggaaaccgagatggggcagtacacagggctgactcagattccccagtgatatacacacgtgtgtgcatctgtgtgtgcatgcctgtgtgtgcgtgtgcgtgagatatgtagctctttgccatgttatcacatgtgcagcatcgtgcgaccatcaccgcagttgagatacggaactgctgcatcagcacaaaagcctgggttggggtttatttaattaaaaaaaaaaaaggttgaaaactaagaattgtcacagcaagtaagtgagctcttctgcagtgctagggcagctcagctgagctggggcgggggcagcagctgggcagtctgcttcctgagcggaggagcaatttcctggtgtccggggactctgggtggcaaatcagggagagaataaggagcgagatgttgaagccctcacccctgccacaggaggcccagctgagaaacagccaccagcttcctctcctgttcctgccttcacactcccctccatctctggttcccgggtactgttccctctctctgtccctccaagcagcatggctggatctaatggcaagcacaggaagctggggcacctgcctgtgcagaatgtgaagcgcggccgtgggctaccaggcctccacctgtgcccacttcgtccttctcagggtctccctgtctgtatcatctctgcagcacccagacctgaccagctctgcagcccaggcacacagaacccctcccctaggcactccacagcctgctgctcccaagagtagagtccccaggtccctcttctggcatgactcacaggcccaggtggctctcagagtgcatagggacagcagcaatgccgcagcgtcacctctatggggccctggaggttccgaggctctggaggcagagagagctgctgctcttccactagctggtgctggccatgtgggaggcgctggggaggctggagggcaggggcggatgtgcagagcgttcaggactctcttccctccacccaccctccaaggctggacttcatttttctccaagaagtggggagtcctgtggaacccagtgtgaccagatggtacagagcacagtggggcggatggcactgggcaacgtcctgcccggcagaggaaggggatgccaaggaccagatggtactccaggctgcaggacaccaggcgagggaccaggcaatcacggggcagtgctgtgttcccctggaagtcaagtccaccacccccacccccaccaatcctagagacttccaggccaccctcaacactggccaccttcttaaaggctaagaataaggtcccttgacacaatggcaggtattggaacacacctgttccttgcaggtgggacacagagatgatgatggtgaggttgggggagaggggatttaagagtgaggggtatgggattcagggttactgtttcatttcctcattctacaaacacattttgagcaccagaaatcttcagaaaatagtcccacatgtctattgtgtgactggaatagtcaatagtcaaacgtcccttgatggttgaatggataaactcaatggtaggtccaagcagcggaagattactcagctgcaaaaaggaatgaggcatggacaggtgctgcaatgtgctgcagaagggcaggtttcactccatttctacaaaacactcagaacaggcaaatccacaggacagaatgcagaggggcagttgccaagggctacgggaggggatggggagaggctgctaatgagtacaggatctccttctgggatgatgaaagtgttctagaacttgacacagatgatggttgcacaatattctcaatgtactgaataccactgaatcgcaccctttgaatcaattaatagttcatgttatgttatgtacaattttacctcattaaaaaaaaatgggcccctctctgactcttctgctcccaggtgagttctgagttttgtcctctctacctcaactccagcagcagcttcctaaaaggcttccagtctatcatccaccacactcccaccacagtcagctccccagaatcaagctcatcaggtctagctctccctccctgcaggcagagctcgcaggactgtgccagctagggccacgccctcagcctcaagccccatgccccagccactctgagctctcttgctgcacttacataagccatgctatgatggtttaaatatgtctcctgaagttcacgtgttgaaaacttattcctgccacaggatgttgagaagtggggcctaacaaaggtaatgaggtcatgagagtctgccctcatgaatagattaatgtagttattgtgggagtgggttcattatcacgagggtgggtttgttataaaagtgagttcagctccctcttgctcatgctcttttgcccttccactttccaccgtgggaggatgcagacctgcaccagatgccagggccatgttcttggccttcccaacctctagaagcaaggaccaagtaaatgtctatcatttacaaattacccagtctgtagtattctattacagcaacacagaatggactaaaacagtgtctttttttttaaacctccatgcctttgctctgtgtgcagttccatgctcaccagttcttgccagaaaacttctgtgcatgcttcaaaacccactcaaaagcctttccactgggcccccaaagtgtttgttctgcctcactgcaaaggatgcataaactgtaacctatctgtctcctccatgaaacggcaagctccccaagggggttgttgggggtacacattacattcatctgggatcctgaggacccagcgtgatgactaacacatcctttcatttcacaaataccactgaaggcccaggattcaatgaggaatgaataaaagatggtgagtcatgagaactcagcccatgaggacctctggctgtcacagagaaatattctcttctcattcacattctttctgttctgcttctgaataccaccacccaagtcttccattctccctgggacagtgagttgaacagctgggaaggaggaggaagatggagagattgcatctccaaccatttccgccttctttgaactccaacagcatttgtaggtggaactataccattttaacaattatagactacatcttatcctttctatgccttgtgaagtgtccccagccctgctgagcacagggtctcggcacactgcccatttccccatggtgagcatcacttactgcagtgggttgaacagtggacgcccagaactcagatatacccagaacctcagaaatgaccttattcggaaacagggtctgcacagatgtcatttgtcaaagctcttgaaacgaaattgtcctggatttaggatgggcctccaatccaatgactggcatgtttataagaaaaagatggggatttggacagagacacagaggagaaggccatgtgacacagaggtagaggctggagggatgcagacacaggctgaggaacgccatgggtggccagcaacccccagaaggtgcaaggggcaagggaagttcttcctcaaagcctccagaaggaaccagtcctgccaacgggcaccttgatttctcacttctggcctccagaattgtgagagattacatttctgttgttctaagccacctagattttggtaatttgttctggtagccctagaaaattaacctgctaacaaactgtacaatttatggatgtgttcagtgtctgcctctctctctagaacacaagttctatgagggtaggtatttctatctctatccatcaatgagtaccaagctcctaagacagtgccccgcaaatagtacgtggccaacaaacactcatgagatgcatgaacgatgtaacgataagatgcacaggctgcctgagcctgactcccagctctgccaccaaggcactaatggtgtgaccttgggcaagttctctaacactgctggactgcagatttctcttctgtagggtggaaagaatgattaaaaagaaaagtcatggagcattacatggattcaatgcttaggaaggcatagacggtgtcttacgcacagttagccctcaacgttagatgttagaaatgaagtcactcaagaataaattaacagtggctctcaactgggggcaagtgttgctccccaggggacatgagacaaatgcctggagacattattggttgttactacttagtggagggattgctactgcctccagtagacagaagttagggatcctgctcagtgtcctacagcccaaaacatcactagtgctgaggttgagaagtcctgatataaagtaaaattggtttctggagagaaagaagcaagacgtaaagatgaaataaagtcccagatacggaattataaaactggggaaatgactacacacacgtctatctttccaacccattagctgccatattgaaagctcacacagagcgtctccagcccagacacagcggttatctgacatttacttcttctgggacactctcagcccaagcccattccaaggtggaggagagaaagcaagagaagcctctttgagcatcgttcgattgccctgttgccactgccacctccaccaccatcgccactgccactgccacctccaccaccattgccactgacacctccaccaccatcgccactgccacctccaccgccatcgccactgccacctccaccgactttgccactgccacctccaccgccatcgccactgccatcgccaccgccactgccaccgccacctccaccaccatcgccactgccacctccaccgccatcgccactgccaccgccatcgccactgccacctccactgccatcgccactgccactgccatcgccactgccacctccaccatcgccactgccacctccaccaccatcaccactgacacatccaccaccatcgccactgccaccgccacctccaccaccatcgccacctccaccgccatcgccaccgccagtgccaccgccacctccaccaccatcgccaccgccacttccactgccattgccactgccaccgccatcgccactgccacctccaccgccatcaccactgccacctccactgccatcgccactgccactgccatcgccactgccacctccaccatcgccactgccacctccaccaccatcaccactgacacctccaccaccatcgccactgccaccgccacctccaccaccatcgccacctccaccgccatcgccaccgccactgccaccgccacctccaccaccatcgccaccgccacctccactgccattgccactgccactgccatcaccactgccacctccaccgccactgccacctccaccgccatcaccactgccacctctaccgccatcaccactgccactgccacctccaccaccatctccactgccactgccacctccaccgccatcaccactgccaccaccaccattgccactgccacctccccatcgccactgccactgccaccaccatcgccatcaccactgccaccaccaccaccattgccactgccacctccccaccatcgccactgccacctccaccaccatcgccactgccactgccacctccaccaccattggtagcagccgtgacagctttcctagggctgctctgcaaaaacaaactcctcctgggcttaaccgtaagcccttggcaaccaccaatgatggggaacttgactgctgctttgctggacccagaccaggaaatccagatgggaagacgcaggagtgcaccagctcctcgtgctctgtggcgaggcctctgcgaaacgggcgcacatcaggaaatgttcgctctcccttcaccaccaaggagactggccgatttcctctccttcaagcttcttccaacggacagagaaaattcccagaaagacgttgggggaaatgttagcgacagcccggagaagaggggaatgtttacgtggacgggcctttgtgcctgcccaaggtgccgtccatcaataccgccaacttggggaggatgcccatcaaggcggagcagggacacagaggtgtcacgtgcacctcggcccacagaggaaggatgcccagtacatctgtcggggcggcccgaggacaggcgacagattcccccgcagacatctgcctgctggaggaacgtgccgtgatgcagacgccggggggaggcaaggagaagggaggaagggaggcaactctttttatagcaagtgagcaaacaaacaaactgttttgccttaagaagccaaaaaggaaaaaagaaaaagaaggagaatacatttctgccactgctgggagcatcgtaagagccaccttggttgaccacagaaagaagtgcagggtgccaggcacactgaggccagggccttccctccgcggccccgaggacagctgagaacaggccagccccagccgctcagatgccagcaacgtgctggcacagtgctcgccctgttgtgaatgagtcctcagtccctgcagaagctcagtgaagtcggatggtcactaacccgatttgacaggtgaagagggtgaggctcggcaagttagcaagtggggaaccacgaggtggccccagctctgagcccccacctgccacactgccatggggacccaagggtctcccgtttatgagctcagccttccgaaggcgaggtggaagtgaaggactgcaaaccccgagttaaaccctctgacttctctccacctccctcgtgtcttcctcctctggccctcagaccctcgagccgatgaaacgcaccacgaccttggcttcccgaggcggcctcccctcaccccgacacgggagctgacattgtgcattccattcagagctccctttgttcaggccacatagaaaccagagctgctcgtcagagaaaagctccatcccataataaacagcatgaactatttataatcccgaaaacatctttattattatttttcttccctccagaaacaatctcacgcaatcctgttaagtacacaccacggaggactggagggccacgggtcggggctgcttcccctggccctgcccagcgaacagatggcagcgtgggcgttaggtaccagcctcctggcaatctgaacatctgttcccgttagaaaatgctaattgccatcaatcaggacagcacctacccacatttacatgcaagcacacatgcacaaaaaaaaaaaaaatacatctaaatttctccaagtgcaacactccctgcatgttaactagcctaagctttgcctcagcctcggaggagcagccccgtggccagcttctggcctggagggctcccgtcggggcctgccctggacccacagcaagcagtgaggttagggagtcactcggcaggtagccatgcttcagcccccggtggcctctcatccgcccagcagggagtaggcacgggatcgcggcctgggcagtgcaggccgcctggacagaatccctccctagcctggatgtttctctctacgcctccacaaagccactcctccggctccatctgtcctcgatgtctgcacccattcccctctccctgagcaaagcttctgggcatccccacggcccccaggaacaacccagctggatctcccagcccagaggtcgtctccatatccacatccaagggctggcccatgaggctccctctgcccaaagtgcatgtgtggagacacctggcagctccaagccaaggtcccagacccggcctctgctgggctgtgttttctaccccgtggggctggggacaagatctctccagcatgtcaggtgggactgggccccagcggcctcctccctcctctagcctggaagccctaggcttgtgaggccccgcaccctctcccggattgttctctggttgagcatcacaaagccacaggccttggtgatcaggaagagtcctggggggcggggggcgagcacaggcagtggaagggaagcaaagctgccccagataggtgggtgacccaggatggagaagggcagcacctgcgagtgtttgccccttggggagtcgagggcagaacctccctccttccttgcctggctttctgcagagcccctgccctccccaaggagcacagacccaggctactccctgggaccttgggagggtcacctgcagcccttctggagaccacagggaccaataacatgccacagtgacctcaggccatgcatgcccattggaggaccctctgcatttttagaaagtgagctggaaacattggcctattatataatgaaagtcccacacacacacaccctccccaagagaaagcgattttgctaatttttctcccgggcggcaggcgccgttgccagccttggttgctatggggcccagtgactggtttgagtggtaaactcaggggattggaggagaggtttccatggggagccacagagtgcagccgatgagaggccacaggtctccccacctagggcagcccacacgaccaggtgtgaagagggcctcctggacccagacctggcaggtgaccccataacaggcatgagccatctccatgacatcataacagggtctcttaatggggacatccctgtctgtgaaccaggtacaggcttcctctgtgcacatgcatgacacatgccatatgcatgcactgcacacgtctagataaggtgcagagctggcactgccacgggcatgtgttatggcctcatcgagatggctcaggactgcggtggcatcacctgccaggtctgggtccgggaggccctcctcacacctggtggcacgggctgctgcagacggggggtcctagggtctctcaccagccacaccgtgctgcttcccatggaaacctctcctctgatgcttgagagaggctgatgtgtggcttaggtccccagagtagcgtgccttcctcagagatttcaggggatgagtgataaataaagaagtgggtggagatgagggcagagcggggaggagggagagaaggtggaaaaactcaaagaaccttgcttccaaatttcttttacattttgccttcttttaagatgatccctctcttggtaccaggtaaactcatgtggatgttgaggacatgaggccacctgatgtcccgggggcatgtcccagctgtgcacctgtggccagcactcctgggccaccccctgctctgcctgcctgacagagaggcttaccgccaccagcagctctgctcctgagctgcctaactgcagatggtggggggcagcacctgttccgtggggcttagggcctccggcttccatccatgagtgccagcgtccctggaacgtgtgccccacctgcctcctgccaggatccaggagtgggcacctctcctccctgggatcactatggtctttgttcagaatcacagtgtttctctctgctatgggcctttgagtcctcccaggaagggaccttgagcaaggcctccgggaagttggcctcctcctctgcttgccccctcccaccacgccctctgaccctctgatttctctgtggctcctgagcatggcctgtctccctgcaaggtgccacaggtatgagaacccaggagacggttcttctccaacacccgaggcagacgtcatgcctcctccctgcctctcacttcccactttgcagctttactgtccgcattgtttggttcgctgagccctaggagctgagagactggttaaccatgagggactgtggagccaggaaacatgactttgaccatttgcccttcccaccctgaaccccacacgctaagaccaaaggaggatgaagtttccaaaatcaacttcacaataatgatagaaattaatgagttccacacagataggcagatagacaggggatgacgcatgaataaatggatacctgcatagatggataatagatagatgagtagatggataggcagatggatatagagacatacagatagacaggcaggtagacaggtgacagatgatggatggatgcatagacagatgatggatggatggacaggtaggtagacagatacatagatggatgattgaacagacagacaatagatcaacaaatgaatggatagacgggtacacacatggatgatagatagatgcatacacagacataggtagatagatcggtagcagataggcaggcaggcaggcagacagacaggaggatggatgaatgaatgaatggatggatggatggatagatagatagcagataggcaggcagatagacagaaggatggatggatgaatggatggatggatagatagataggagacaggcagacagataggaggatagacgaatggatgcatagatagatagcagataggcaggcagatagacaggaggatggatggatggatagatagatagataggaagatagatggcagatagacaggaagacaggcaggaggatggatggatggatggatggatagatagacagcagataggcaggcagatagacaggaggatggatagatagataggaagatagatggcagataggcaggcagatagagacgggaggatggatggatggatggatggatggatggatggatggatggatggatggatagcagataggcaggcaggcagacaggaggatggatggatggatagatagatagactgattgattgactgatcgactgacagactgacagatagatagatagatggatacagatagatatggatatagctcctctatagaggagaaaatgtagggaaaaaacccctatattttcccctacaccttctcctttatgggtcattcagaaaggtcggtccaggtcttgacatcgagttggcagcagaggagccaaggactcaagccagatgaattctcactggtcacgaggtgtctgacatgtatgctgggcgggctcaagtccaggtctgtgcccatctccctgcagcagcactggggccccttggccgcccatgcagtcctgggaatccaggcaccagggaccagacctgacctgaaacagggatgtgtgtggagaggaccccactccacgtcagggcgcctggtcctgcctaacgctccagcctggacaactgccctgtgcctacattccctgtgccgtccctgtcccctgtcctgcaggtaagcagctgaccacctgctcgcacctcacatctccctatggcacatgccccaccccaccaccctttaggtgccacaatgagcctgccagaccagactccctccctccacccacagctgcacacaactggatgtgggaccccaaaaaacaggtttggcctccctcattccaccaggatggggtgatctgagctaagagagggaaggacctctagttaaatgtaatggggagggcagcttgctcacgtgcagtcagaagaacacgcatgaaggagagcgctcatgagggagagctcgcatgggggagcacgtgcacggaggagagggtgcacaggggagaacgtgcacaagggagaacgtgcatgatggagaacgtgcatgagagagagcacgcatggagatggaagaccatctcatcgtctccagcccatagctcctcaccctaaaacacatccctggcagtgtgctccaaggagtgaccaagagccagggtgagggtcgtaggcacgtgtggggcctcctgcagaccacaggtgccttggaggagaggctgtcatgggtcatctttgtgtcatccttacgttcagctccacacacacagcccctggccccgatccagacccaaaagggccctgcgaatgttggagaatgaatagttgtgtgcttcaatatcacctgaactcaggagatcactactggagacaccaccgcagccccagtggcccacatgtgtgtacctgggacatcatcctggccccggtggccaaaatgccgtgtgtccactctgctggacagaggggaaagagtaaagactgtcaacagcaaataagacaggctggcgggtgggctagggctggacggagggctgtcttcactcaacagctccccccgaggctactggctccccatgtgaaatgtcgccacattataagcagagtctcataaaatttcacaggaaggtggcattaaaattcttctactccaaaccacccctcagcacacacatgcatctaaggttagaatcccttccccaacatcctaccacgtgcttctcaagctagggaacccccctcagcccccaagggtgtgcagaggtgagatgagggtggctggccacacagcccacgcatgtgcctcctctcaaagtatccgttctagccaaagtgtctgggggaactattactgtcaggttatagccagcacaagcatattgtggattcaatgtaagatgtgcttgaagttttaagagaacaaataagacttcaaagaaatgtcatcctttctctggaccccttctggcaacacacgcccagtccctcaggggtacaggtttaatatttcctctcttctggagtcttccggggaaaatgtatacctccagggaaatgctgtgtgcctctctgtcatccaagacaggccacttaatctccctttgcctgagcacagcccactgcacgcatgttctagctctgtgatgcaccaccacgaaaaaaataacagcagaaccagcccttcctttctattcactgaaggagaaaaaacagaattaactgcttcatagacagtcaaaataagctttctgctggcctcagtgacaatgcttgacatccataatgcagaatggaggtgagtcctgggtccccagcacccctcctgctggaagaggccaggacacacgaagggtctctcatgggaagcagccatcgtggctctcagctcatggaaagcggggtacgtgaccagcactggccagggtgcgacgcttggggtattcgcagggaaatgagggcaaagcattttgcaaagagcgtgcagggccgggcaaaatactaaataattcaaaaatcatgatgaccttgccttgggaacttttggagcaacagaatggtttagaataatgacccatccaatgacattctggctcacagacaagagacaatattcaaacgccacctctggtcacccctggcctgagggacatttgttttggtggctgaggcagccgccagttacccagtactgtgggtacaggcgtgagctttctcagctacaaagagcacgacataaacaaggaaggcgcacacacacctgtcacctctccgtggactgcagtgtttaaaagacagtcatcacccaaagtgctttttataacaagaaaggactctgaacgttgtcaggtgagtagcactgcctgtgtccccatggccagggcgtgtgcagagcctgggtggacgcaggcaggttagctatcccagccctatgcatcactcctgcatcacacctagcgccccgtgtgtgacccgggatcccaccgttctccagggtcgagggagaacacttcaagagaggcgactaaatctccaccaagcacattatatcaaatacgcctcaggaaaaccctttatggaaacctactatgtgcagcactgtgggagaaacaagttgcagcctgtgcccttaaggaactccagaaagaaaaggggacaggtgacaagagacatgaccaaagaggcagctccatgcacagatgacgacgaccgcccagctgccctctgcaggtgtgcaggaccagagggcaggaaggtggggtgggggtgggctctgggtcatgcccacttggcctccatcccagagagcagctcccccaaacctggaatgatgagtgtgcctgacggggcccatctgagatagaccacagtggtcgtactagctggtggcagagggttgggagtggtagtccttaaattattttgaaataatttaagaatcacaggaagttgcaaaaatagtacagaaaattcccgtgcacccttctattatggactgaatcatgccctctcaaaattcatacattgaagtcctaacccctagtacgttagatgtgaccgtatttggagataggacccttaccaggccatatgggtgggcctcatccactctgaccagtgtccttctaagagaagaagattaggacacagacatgcacagatcaaggggcggccatgtgaggacataaggagaagatgaccatctacaagccaaagagaagccttcaaggaaaccaatgctgccaacagcttgatcttagacttctggcctcttgaattttgagaaaattaacctctgttgtgtgagcccccaggctgaggggcttcaccatggcagcccaagccgaccacacacctcccacatctcatgaccaccctccattctcaagcgaggacactgccctgggtctgttggtcagtggcagagcttattcaaacgtgacaagttctgtgatctgacctgtgtggcctctataccggcacttctcaaaccatctgtggtgaaggattcattggtttatttccaattcattctggacctacatttttgtttctttgttttgttttttgagacagggtctcactatgctgcccagctgatctcaaacaccagggctcaaccaatcctcccacctcagcctcctgagtagttgaagtgacaagcccttacttttggtttttagaaaacctataaaaatagaatcactagaaaaatggaataaagaaggcatacaaaacacaaagcccaggttcttaacgattagactcatcagacctaaaacgactccttcaaatgactaaaagattctaaatgcttaatttcagcttctgtactcagttgcagggatcaggagcagcacctcacgggctggcacccatccacagacctcactttgagtagctgagatatgggtcatgtgagacgtgtcctcagcctgttgctagggagctgctgtgggtttgaattctgtatggccctgggttggtcatttatctgcagctcagcttcctcacagagcccgagttggaactgttgtgaggattcacgatgattcatatatattttgggacgagaacctcgggtaagataacctgctcacatgtgtcattcagggacgtcagcctgatggatttccaggccttgcatactgttctggacactccaggcacacagatgcctcccacaagaagttgtgttacgagtgtattatttgatctttgttgaacttgggtttatctttgcttgctttcaggccctcccataatgttgacatcctgatgaacccccgctggtgacggcaggtggccacaccctgcaagctccctgtaattccagccattactcagcaatgctcagcaatgcaaggtcactcagaaacaccatctgtccaagctccatctcccctcccaccccaaaggaaaaaagaaaaattattctgttccgcctccatttttctcctcctcctaaaagcacacacacacactcacacacacacacacgcagaactaaagttaggcttgccttgacctctacttctaaattaattttccttcctcaggcatttgctgacgctccttttctgttctttcccccacagaacacagatgtctttgaaagcaccaatcctgcaaacactttgtatatccttgcaaatcgggtaaaagaataattttctccaaatctatacaaatcctcactcgtccattcacctttgccatggaattcaccggcaaccccctctgaggaatgcacgtgtcaatgcagaaaaaaaaaaaaatgaagaaattccggaatcacatcgaggggcctcagccccaggtcccatctaagaatgaggccagcaagaaccacttaggctcttggatgccgttgactcacgtccctggtggcccttgatcattttgaatctaaaacatatggatttatacagattcatgtggaaccttctcatgtttctccatccagaatatctctgtgacgatgcagtcacaagttctgcagttacttctgtgtgacagggtctgtttggatcatgcttgcacaggtgtcgatataccatcctggaacacgaggactaaccctcctttccctcaacggatggtgacaatcatttattggctctcactgaagacacagcccttatcgctgggggactcagcatctcagaggaggatgggctgtgcatgcagagggaacacagggagcaaagtctgtgcagaaggtcacctcactcacatttgacttttgtatccgtgaacttcagtgcagcgtgtacccaggatctattttctgcttccattccccctcattccctggtgccattagttccttttcctaaagtcctcatgggtctcccccagccctggactcttacctccaccatcaccacctgactcagtccctgctgcccgcccactggcctgcctcaccaccagagccccacgcatcactaacttcagcacccgtgcccacccaaaaatgtgtccacatccctctctccccagaggtctctttttccctctgtttcttgggcctgactcctacctttccttccaattcattccttccacacctcaagagccccctggagagacctcacaggctcccctctcctggcccagctctacaacgcctccctctcccacaggcagagcaagactccagtttctctctcctgtgacaaaagtgtgcgcccaaaacttgcagcacgaactgtttatttttaggtttagatttggggtctggcttttaattcttagtttgttctcaagtccgatctcagcagtgggaggtgggaagtgggtgggggacagagaatgatctcagctcatcgttccaggtgcctccctctccactaggtctgtggacggccttctgacctggggtcctggggttcttccaatgtccactcttacagctccagtcattctggccttggttttaccgctcagcctgcataccttcttatcattgtcttaaaatcagccaagggatggttcttttccagagcatctcagtgtctgggtgagatcagggccgagggtcaggggacacctcaggatgagtcgtgggctgtagagtcatagtgcctgggttcatcttcctccctggcagccttggaggatacagtgggtggaatcatgtccccccaaaacatgttccagccctaacccccaggacctgggaatgtggccttagttggaaataaggtctttgcagatgtgatgaaggtaagaggtgggccccgatccaatgactggtgtccttagaagaggaggggaatgagaacacacaggtgcacacacatgcatgcgtgcacacatgtacacacacaaatgcacacacacacaggaaggtcgtgcgcgacaggatacacaggcatgggggtggggttgcctcatgatgatggaggcagagactggactgacagtgcatctataagccaaggcccacagaggatggccagtggcccccagagccaggagaaaggcctccgtgtgtgggacagtttctccctgagaagcaaccccgctgccctcctgattttggatcctggcctccaggaattggtgagaacgaagagctatcgtgagaagccacccagtctgtggcattctgtgatggcagtcacgggacaccgacccagatgatctgaatttccagccccactggccaggctgactgtcctgggggctgcacctgacaccctgtgctctgggggccactgacaccctgaggaccaggccctgctggctcctctccttggattatttccatctggggagcagcggcagggccctcccttcccgctccagcgctggaactacatctggaagctcttctcacccttaattgttcttaatgctttaacacacggagtgactaatgggctctaattgggagcggtgtcctggggaactcgcccacagcgccctctgcgacccgcccagtctcctccgctgctcactcacagagctctaaagtcaccaaggaaaaatattggcccgtttttctatttttttaaaaaatgtcacaccagtgccaaaaagcagttttatccttcagccaacaagtatagggcaaagaaaaggatagaggcaaagccaaaagcagatgggacaaaatatcacaaatgccactgaggtctgtgacatctgtctagagacaaagagttcttggaggcaaaccccacgccagtcagttcagggcgtgtgaaggattccagccacatgtttccccttgaaggggaaaggaaagaggggataaggcatctctgatgtcttctcatctcctctccgacccctgtgaggggtaagtggtgactgccaagtcaccagaactgcagagaaggaaccagatgatagagaggataggcagaggcagggtggcagaattagggggtctggaaaagaaagtgcagaaaagcctgaagtgcacacaattcctcagtggggtggcggggacagagagagacagacagagacagagaaggaggaagaggagggggaatgagaaaggaaagaagtagggggagagaaaaaagaagaaagaggagaaagaggaaaaggagacggaagaggaagaagaagaaaaggaggaggaggaaggtgctcaccctgtaaccccagcactttgggaggcctaggtgggtggatcacttgaggtcaggagttcgagaccagcctggccaacagggtgaaaccccgtctctactaaaaatacaaaaattagccaggcgtggtggtgggcgcctgtaatcccagttactcgggaagctgaggcaggagaatctcttaaacccaggaggtagaggttgcagtgagctgagatcgcgccactgcactccagcctgggtgaaagagcaaggctccgtttcaaaaaaaaataaataaagataaattaaaaaaaaaaaaaaaaaaagagggcgcggtggctcacacctgtaatcccagcactttgggaggccaaggcaggtggatcacgaggtcaggagatcgagatcatcctggctaacacggtgaaaccccgtctctactaaaaatacaaaacattagccagacgtggtggcgggcgcctgtagtcccagctacttgggaggctgaggcaggagaatggcgtgaacccgggaggcggagtttgcagtgagctgagatcgccccatcgcactccagcctgggcgacagagcgaaactccgtcaccggaaaaaaaaaaagaggaggaggagtaggaaaaaagggtgaaacagaagcaatggagtggggccccaggtccttgtctcatgtcctctttctcacagggacatcctcagagcttgctctggtggtgaacaagcaaaggggcagggtggcagaattaggcaggatcagaatgagggactgaagtggctgagcctggcatccttcctaaatattttccaaatacatttcttaatagaaaaggaatcacagaagtttttaggacccaagtctccaaagactggctcaaactaaagtcttctcattaaaatattggatccaagaaggaaataagatgcccctgtaggaaggagagaccccagcaacgtccttcagctgggcaccgcctgttccacccaggagcacctaggacgagctcctgcaaaaggaatgcattcactgcaagcctgggagcaacgtcccatccgcttctggtataactaaatgaagccatgatccccctctccccgctgccaagcaacgctcatgtgctccaggaagccccacgcacgttcccacggctcatgcgggcagcctgtgtctcggctcagccctcaagggtgccatgctccccgtgtgatggattccagtttaacagcttttaaaaacaagcagacaagagacgggcgtgatggatgagtgcaggaagcacgctcatttggagatgatttatgggaagtcatgtgttgccgctcatgggtgcgtccctgagggtgggggccggggtggatggatgagtttggatagtgtaagctgcactaccacggcaggctcacactcagccccatggcgtgtgcggcagctcccgctcccatctcatcacggcaggctcacactcagccccatggcatgcgcggcagcacccgctcccatctcatgctgtctgcatcagggcagaagactttgtttatctctcagctccagaacaaagatgctcccccatccccaaaaacatctagagaagagacaaccggccacattccttggctcctctgtgtgaccccaacaacgaacagcaatgtggtttaggaaaattcaggttatcccatgagagtggtgaaggggaggggaaaggaagggaagggtcagggttggaggagcagatgaccctcctctggagtttttgctcaggcccatctcttccctgtggacctgaaagacccatctgctccaggcctcagccactgcatgtaacagacaaatctcgttttgcagcatccatgtttttaataaggacttagaatttactatacagtaaaacccaaattgaatccatagttaaagggatgagctttaaaacgggatctaattgacaggaccctttccgaggcagaggcaatgaaccagggctgaggcaatgtcctaggaggaaactgcttcctccccacactctcctttgaagcaaggactcgcctgcagtgatggggagtctcggtcgaagggctccttgccaaggccattcctgaatcagaaaggccagcccgcctcactggggcaaaagctcctgcaggcttttccctgcccgggtttctccatcactgttctccaagtccctcttaggaagccccttcctctagtcacattcctttgggccatggacggcatccacatgccagagctctggtagcccaaggggtggttttggcggccccttctctgaagcccatgtccaggctgcagggagaacccaggagctcgcggggcaggagggtgtctacaggcacacctgacctcagatgtgtgtacatggccctcttccttcagacacccgccatccaccatcctgaaggtgaataaaagacaggcagagattcaaagccacacgcaggcctcagactgcattgctccttgctctgaggggcttcctctcagaggggcttccttctctccccttgacctcacccttttagaaaaggaagactctgaaaggcagattcctcacttcacaattcagagcacacctttggaatcaacaaggggctggacagtgaacacaccgagggaagcagctcaggtccaaaagagcttgtggggtgaccccaccaaccctggacttcccagacgctccctcgggggtgggctggtcttgtactttcactgttgatgaccccgaggatttacctatttgggggacacaggttctcagacccacagaaaggtgaggctgggccccgcaacctccttcttggaggcagcaggaagtggcattttcagaggagcatgggagatggtgctaccgtcacggcctgcaggatgtctgtacgtcagggccctcccctagggacagagctgcacgcatcttcttggaactaggcgtctgaggttccagagacagagcatgatctcagggggtctctcgtcctgcactgaggccagccccaaacctcgtgccctatactcattttctcagacagcctgcaagcacagtgatcttggcacagagcgacctgaccaggagccgtagtggatggcacaccagtgctgccttcacagcgacactgcagggagccccaggacagaaagagccagaaagagcagtgggattcctgccctctaaacagtcacattgctgcttctctgtcccatacaggctggggtgtgtggccttcctatctgggctccccgagggggcccctgatggtttacggaatggggtgacagccgtttcagcagaggaggggagttgtttaagggtttatctcagacatgggcccagatccaccactcctctcctcccgggtccatggcagagccagtgctcccagggatagagtgcgacagtgggctcgctcgtcagctgtcccttgcttccactctgtccccctcacagaaggcagagacacctttgtatgtctcaggccattcaatccctcactcagagccctgcagtggctcccaccacccttaagacaaaatccaaagtcctcagtcccaacctaaaggcctctgcatccagccctggaccctcttcgtcatctccttcctccacctgcacagcccccggaccccgtgatgccagcccctcctgctacttctccagcatgcccacacgttgctgcctcggcgccttggcactggccattccctctgtctggaacactctcccctcagacatcctggggtcctccctcccttccttctgtcttggctcacaacatcagcaccggggcctgcccttctgtcctgggcaactgcagcccccaccattccccgtggtcttaatgcactgcatttatcttcacagcgttatggcgcctgacatacatttattcgccatgtccctgctaaaatataaacaccatgagggccagaacttgaccttgtctccactgcgtctccagcaccccaaacagggctcagcacatcgggggctcaaggttgtggaatgaacaatgtagggcagtctggatggatgagctacggcaagaagaccccaaggagccctggagcagagaagagcacccatggccttcaccagagagaagcaagcagtgcacgcctggagaagcacccagactgtgcatagagacttccaattctgcaaactctggaaagagcatcttttgatgggtattggagagaccagcctgtgtccgggcctctggtctctttgtccagggttctcgtcggcatcatctgctcagcctacagtgggtcatcatgcaaagcctgcctgcaggcttcagggctccagtcctccctgcctgggggtcgctgacccacagctttgcattgtctatcagcagggaatggggctgcactgaacctcatgggggtttaagaaagaattcacctggtgtctgtccctggttcctgggaggtgatctctaaaactgctggggtttccaagggataggagtgtcttctgttattcataaaaagccactcctgaccacacctgaccgtgtgctgacctggcaactcacagggacccgtaggaagcttcaagtgtgaggctggccgtgcacgtgattagagggttggaaatttcactccccacctcaggggagcagagagggctagagacagctcagtcacgtggctcggggagcttgcggttggtgaacttgtgggtgaaccagcagggtggtgcatcctaacaccatggggaatgggtgtggatgctccgaactcaacctgtgtgtatcatacgactgtcatacaactgtcatttttagtgtagtgcttttttgttgctgtcgttctgtgaactgtagcaaattatcaaaactgaggggtcctgggaacctctgaatttgccactggtcacaagtgcaggtgaccctggcagcttgcattcgaagtgagagccatcttacagagcacttggcccaaaccctgtggagtctgacgctgactccggcggttagtgtcagagctgaacggcagtcaccctctcggggtgggaacagaggcatcatgccgtcccctctagagccacaggaaggcttcagggccctccctgagccgcggagcaatctgggcagcagaacacgaaccgtgcaggggagggtcaggccctgactttggactctatggcatctttgttgacaccagacagtggaccccacaccccgcccaccctccttccaggactaactgccccgcagccaggctgatgggcttcgaggtacaaagagcggtcactccttaaaaattctaccccataccttcttgggcgtccgtcgatgttccccctcctactccacaaagacaccatgacttgaaagctatagagagcagcacagaacgcccctaccccacaacccttgctggaaaatcaaatcaccgcattaaaacgtatttcctccacaaatgcaaactctggggatgggcatggcggacaggtggggccgccttacctggtagtgggaggtgaggtctgctttgctgagcggggaggccccagtggggctccttctggaccgtccttggcaaggagggggctgctggggaggagtggcgaccacaggaagactgttagcttctcagaggcagaatttcaacctgcagggggaaaaaagcaagtaaaaaaattgcctttgaagaaaacatcttccttttgatctaaaacaaacatttggtattaataaaccagggagggggcagcttcaaagccaactgtttgccaccagggatcgagggattgagggatcagcaccctccaaagggcactttgctttttatgccccaggggagtaaaaggaaacttgcagaaaacacatcattaggaccctattgccaaacagccaccgtgcagtccatcccagggtccgcccctctcccagcccgcttgcaatggtcccccaatcccagggactcttccaccccaccacgctggcccctccccatcgcctttcccactaccgcccgctcttgcttcctcccccacccagcctagattccaggacccaccactgtccgcactctcccagctactttgtccctctcttttaaaaatattcatcagatgatgtcactgtcctgatctggtgacacagccttccactggtgtcctgtgtcatttggaagaaacacttaaagttgcttcagtggcctgcaagccaggtgaatctggcttctgtgatttggggacttcctaagaaaataacatacgaggtctcacatgggggccgtgcgctcatagacagcttcacggtcaaccccctttgcctttggggctctcggcagtctggctccctctcctagtatactccctctctcccctgcagccccactggcttcctggccatccctccacacaggcgcatgcctccccgaccccacccctgcaccacacctttgcaggtctactgcatggaatgctcttccctgcacaattgcaggcctccctccctccctccctccctgcctgcctgcctacctgcctcggagctgtgcacatatggcacctttccaaggccatccaggagcagaacaccccatcaaaataaccagcatccctatggcatttccttctccttttccccacgaatttccccccagggacttagcacatctggcttcatgcggatgtgctggatcccgccatcccactttgcctccactggaatgcaggctccctgagggcaggcatccacaacggctggatttagtgctgaatccccagtgcccaggatgtgcctggcacatagctggggctcactccgtattcttctgagtggataagtaaatgaatgaatgaatgaacccacaaaagttactcccccattaatacttctgggtttatttagaatcatatcccacgatcacaccggagagcaggaattcccgggatatggaggggactgaaggattctgtttgtttagttggtgagggctggcagggggtagacccaagcctgggaagtcttgtttgcttaatttactccaacccaaacagtgtatgtgtgccatcagccagacaggacacaaaaacggtttaggagatccactctgattagcctgagagactgtctctgggacagagtcatgagatcagggtggccagggagtggctgagctgtgtctccctgaatcccccccaccactggcaccacccagaaatttcacaacggagttttaaacagcaacacacaacaataataaatctaccagtttgtttcttttcctaaaatccagtcactggacagagtaccacccccataccgaagaaccgaagagcagaaccagcatcacagagagcccagcaaccccggagcaatgcctggggaacatctgccctttcagggaccattggtacagagcccagtgcccactgctgggtgtgggagccactcttcaatggcaaaagtgtaagtaataggaacagttccatggatgaaatgcagccagggaggtggctgggagagggcctgggtgcagggggcctgggtgcaggggcctgggtgcagggggcctgggtgcagggggcctgggtgcaggggcctgggtgcagggggcctgggtgcagggggcctgggtgcaggggcctgggtgcagggggcctgtgcagaggtagaggactcaggtggaggtggaaggcagcccaggttgggtaggaaggggctccaggaaggggctggcctggtggggagagaaagcaggcggcaggcttctctgcgacctaagtgcttgattctcagcaggagcacaaaaggcaagggctagaactcacactgcaccaggccctgggcagggaagtccatggggaactgaagatctgcacctagcctcctctgagcctgctgtccacacccccacagccccagcttccagctgttccaatgaccggagaagcagaagtttctgtaagccctcaagtctcccctggtccccttggggctttcagggagataataggatacacttctggtcctggaggcgattcccaagcatttgctttaactctcaatatcacctcctccccagacagggctcccagagccaggatggaggcaggtggtccagggagactcctgccccgctgctctctcccaccagccccaaagcagaggctgcccagggcctgggcgagaggagagcctggggagaggcgggctgtctgccggggctctcacccttcctgacttgtcagttctcttgcctttgaggcggatggagccctccttcccagagcagtcctggcaggggaggcgcccacaggaaggaatggaaacagagtccatccctggggatcccaagtcatcccctggggccacatggacacccatgctgcccagcctggcagccagtccagggccagggaacataaacccttgaaggagagggggaggaattagagggagcaaagacagggtcgggagatgtgatgaaagaacccaagagaagctccaaccccactgctcccctccccagcacagaaatctttaagtgtcatgcctgaaacccaggccgccttctctaggtgctgctcttgctcctcccccatccagcctagattccacatccccccagaggctgagctgaaggcggtgcccccagcagccccacacttctccaccacaccttgcaagccaagctcacaggagattatttcattttcattttaactggtcctacccagccctgtctgcagccgccggcttagaagatggagacacgagcgatccacaggccgccgagtccggagggcagggatcagcctcagggcagccacccctgcctgcgctcgagcctccttggcgccccgcacccctcctctgccgccggctaggcgaaggcgctgcatcctagccccaccgataggcccagcctggttttgttttgacccgagctgagtgggagataacttaacagcttgtccccgattgtaatggcatgtttttccccactccgcagtgggaaacaccatccatcatccatagcgcagaacacgggcctatggccccctccgcgtgcgctcctgtaccccacgccccaccccttggtgctgcggggtttaggggacctcagggctcgccccaggcttgtggctggcagaaggagtggaaccacggtgggaggcaaaaggcccagtgaccaagtacccttgacggctctctaggccccgcagcccggcagggttgggagcgtagttgggggctgggctgggctgcaggtggcttctcagggcgcagtggcagggaccagggtgggcggggcctggtcgaggccacagcctaccattcccccacttcctggggacaaaagggtccagtctgtctcgggagtgagctgtgtcctcctcattctccgacctgtatttattgcccctcaccatgcgctgagtgcagtgctcagagcacagcagagcacacagggacaccccactgttgaccttcaaggggaaaagcccctgcagcctcctcaactccccttcttctgggaggtcagttggggaattctgagatcccatcctgtcccctacacacacatatgcgtgcacatatgctcacatatgcacacgagcacagacgggccatcctggaccctaccctccacctgcttcctcaggatctaatcctcttgctttaatgacagggcccccaaataataaaggagtccagggagaggcttaagcatccccagaaggctggctatgggtggcagggcccccagaagagctgggaagcatgaggagtgtcctacaaagggtgagggctgtgccctggggcttggaggggggcctcagtctcagagaaggattttaaagactcctgtgcccgcatctgcagctggccagtttcctcttcgcagctctcagcctggctgcttcaacctgctgcagaaccagccagcactgctcccgaggcagcacgagactggggcagcccctggtgctctggccccaaaaggtctcctctcagattcttgtcattggaaagagaagatagaaaaacaaacatctggactgctataaagtgtcctctatcaaaaaataagcagatacacaaagggagagggaggtagcagaaggagtgagagagaccgagggagggaagaggagggaaggaagcctctggggatgaggcatgttcacccagcctggacaggggaagattgaggagggccatggcagaggtgtgggtgaggcacacaaggtagctggagcagaagccacaggcagatagcccaggtgagatgcactggccaggcagagaggaggctaggatggcaggccctgggcaagggcagagaaggcagaagtcagatgacctgccctggctggccccgacgaccttggactcacgagttgcctttggtcagaagcgtggacttgtgttgacaaagatgctgcagaggccgggtggcggggaggccagaagcaagggacacgcacagctaggaaagaatgtgctgagatgggggagaggagagcctggccgaatcaccatcatcatcctcgtcctcagccccccgtcagtgtttgctcactatcgtgccccagcgcctggccaatgctggcacacagtaggcgctcagcagttttggtgaaatgaatgctgcaaagaaggaagtcaatctgggtgagtggcatggagctgggtaatgtttctgatgaaaattccagcactttgggacgctgaggtgggtggatcacgaggtcaggagtttgagaccatcctggctagcactgtgaaaccctgtctttactaaaaatacaaaaaattagccaggtgtggtggcaggcgcctgtagtcccagctgcttggagaggctgaggcaggagaatggtgtgaacccaggaggcggagcttgcagtgagccgagatcgctccactgcactccagcctgggtgacagagcaagaccccatctcagaaaaaaaaaaaaaaaaattcctgggtgacctgaacaccaacaaatgggatcaagaagttgtcactgatttgcatctgacgacgggatggtcttcaggctcctagaggtgggggtgaggtggaatgaacttcccattctacatggcaaagcaaatgaactcagcccacctaaaacacaggcaccccaagaccctcacactcacagcctcctgtgcagagagaggacaaacagccaagcatacatcctggatttttttccgcacatctccaaatagaaggccacacttggacttcagcatgcaaggacaggctggggacatcaccagtcccttataaattaaggctcatctgaggacatggcttcatttataggatttaagatgaggcatcacagagaggcagaagtggccggtgagttgaggcggagccccccatttcactaccccctccccggggcctactgacagcagcacatgggggaatgagacaatggtccccctctgggcagatgcagccttgccagtgcaggacttgaattctgaggctgttcgtcttctcagagcatgctacactccattctctgcaacagcctgattggcatgccttggaacattccaggccatggcaagggaaaagcttggagcaggacccgcaggcctgggttctcctcccagcccatcactgtgtgacctgggacatctgaacatccctgatcctttccgcatcaactcacaggaagtgtctactatgtggcagatgcagacccaggttccggacattcaacaaggtacactagcaaccccatccctgcccaaagtgtcttggatgtcaccttccctgccccctgtatgaggcacacagaaagaagacagaaagggctttgcactaaatcacagctgcgctttctcctaatactccgaggagtcaaatgacctctgaaggccaccagagccacaggcctctttgtgatggtcacacatgggcttgtgaaagagccatttagggacatagcataggggactctgagaccaggggctccaaaggaaggaccctaaaatcaccagaaatcaagtttgggtttttatagcattttgcttatcttttgttttgttttgttttgttttttaacaaagatagcaatatcaccagaaatatgcttgcattcttatttggcttcctggagggactcagaaaatggcatttgcaaaatctcagaggactccactcgcacattttagattttacttttctccccaaactacgcctttgctggttcattttattgcagagagcggaacattttagccttctagtcctgccagaaagttaaaaaaaaaaaaaaaaaaaaaagaatcagagtaatggcaaggatttaacattcttcatttattttattttttgagacagggtctcactctgtcacccaggctggagtgcagtaacttgaacacagctcactgcagcctccaccgcccaggctcaagcaatcctcctgcctcagtcccccaagtagctgggactacaggtgtgcgccaccatgcctggctaatttttgcattttttgtagagatgggctttcaccatggtgcccaacctggtctcggactcctgagctcaagcgatccacccaccttggcctcccagagtgctgggattacaggtgtgaggcactgcacctggtccaacattcatttttttaaaaccatggaattctccaaaggtactagagctgtgcaccctcccaactgcagcatttcctcagggtatgcagccctctggagcttgcccggggtgcagttcctcaaggcactgttctctttccttctgtttttcttacactagcttctccctgggtgccagtggttctacttctgccatcttttctggttaatccctctcatacctttcagggctgctggctttgctctcttccattttccatcaccccaattcctcctcagcctctgtaccccgcaaaacataagctcctaaccaaaatcagagtttaaaataggactcaaactaagaaagcaaaatttgctctttctttaaccaagagaaaaacaacacagagcacctcattttagtagtaaagattatagggaatatacaatattcagaataaatgaacctcctccccctgtttttaaaccactcttgtgaaaccagcttaattcctggctcccctcatgccttctgaatcctgtctctggcaaaaataatttgggttttattcttctggcatctggtgggagtcggtgacaattttactgtagctatacttcttcttttttaataccagtgtgttttaataatacagtgtaccttttggtattgttgaaatgttacattattcaacgtatccaacgggaaagggaaaggccttttgtaatttatgtgtcctcagtgctgtgtttaaagcttgcaaagtggagggctgtaatttgggaagcaattttccccaaggtcgggagaatggtttctggaggagaggctggagactgcctgacccgggttcagtggggctgggggcccagaaccctggccatgaggctgatcctagtggtagggagtaccgtgggctcaaaatcagaaatgttccccaaaatacagcaacaacaacaaatcctcagcctggctatggctggcttgctgggccacttgggtttcaagcaactcatttagtttccagtttctggcccttccagagagcatcactgctgtgctaaacatccatgagtccctcctgcatggatactggggcacagctgggaacaccacaggcacctgttgaggggcctgcagtgtagagagagagagagagagagagagaacaggtaaaccacaaccccagaggcagggtatgggctcctacaagatggcaagctctagaaggttggggccttatttttctcagcaccacagctaagccatcgagaatggtgcctggcacaccccaggtgctaagcaaacatgcttgagtgagtgcatgaaagagtgaagagccaatagagagacatgggtgacgggtgtctaggaacctaagcagaggtactgcattcatgggaggtgttctggcttcctagggcaggtgaccaaccctggagtgaatcggagaggagaggggaggggaggaaaggagaggggaggggaggggaggggaggcgaggggaggcgaggggaggggaggggaggagaggggaggggaggggaggggaagggaggggaggggaggggaggggaggggaggggaggggaggagaggggaggggaggagagaggagggcaggtgcagagccttggacagaaggggtaggggaaatgtcatctagggaatgcaaataatagaggaagtttaggactaggggtagcaggagatgagaccagacatataagttagaaaccagatcaggaagtaccttgaacaccatgccaaggactttaaaaagccatttgaggaattttaagtaggacatgatgaagatttgggtattcggaagcacgctctggtgccgatgtgggctgggtagaggggaaaaaccaaggcaggaatctcagtagggaggtggcccaggtgatccaatggcctacggaagggcggatggagttagtgactgtgaacaccaggactcggtgaccagtcccacccacatgggagatgaggaagacgcaagccacctcccgggtttcgggtttgtccaactacataaatagggggccagtttgtgataaggtgaggaggaagaagttgggcttgggagaccaggacatcaggaaattgcagtgcaggggccttcagcttggtgatggtgtcatttatcgcattattacccacagtctactctgctattccttacaccttttcctatgttaaaaatggcacaaggccgggcatggtggttcatacctgtaatcccagcactttgggaggccaaggtgggcagatcacttgaggtcaggagttcaagaccagcctggccaacatggtgaaaccctgtctctactaaaaaactacaaaaattagtcaagtatggtggtgcatacctgaaatcccagctactcgagaggcaggagaattgcatgaacctgggaggtggaaattgcggtgagccaagatcatgccattgcactccagcctggatgacagagcaagactctgtctcaaaaacaaaacaaaaaagaaatggcacagtatgatgtttcaaggccgatggggctgagctcacactggacatgctgagtttgaagagcccctggaatgtcggggaggagggttggtcagtggtggtgctagcatccaagctggagagaatcctgcctgcactggggactgtggcagtccaggctctaagacagcccctgtgtcttcacctcctggtgcccagacaccccctggtgtcacctcccctgtcataccagcactggtctgtgtgaccaatagaattcagcagaagtgaaggttcatcaattctaagattaggtcttaaaagagctccatctttctctcactctggaggaagtcagccgccctgtcatgaggacactcaggcagccctacagagaggccacctggagaggaactggggccacagccagcagccacgagagagaccagcttacaagcagatcctccagccccagttgagccttcccatgcctgcggccccggccaacatatcaacgcaacctcgaagggacgctgagccaggcactcagctgagcccctcccagattcctgaacctcagaaaccatgagctaataaatgattgttgtctaaagccattaaatttggggataatctattacacagcaatagataacatagggattacaaaaaaatatgaatggtggctggagccacaggcatggagaagaacgcgaagtgagaagacaggatgagagcagattacagaggtgaggaaggtcacactgggacacgccaggaggcagtggtgggagagaaaggcccgtgaggagggaggaggaagagccctcaaaaggaggaagacaaggctgagaaacacaacaaaatcccaaggatgagaggtctattaggctgttcttgcattgctatacagagatgcctgaggctgggtcatttatcaagagaagaggtttaattggctcctggttctgcaggctgtacaggaagcaccgtgttggcatctgctcctggtgaggtctcaggaagcttccactcatggtggaagctgaagagggaggaggcgtatcacacggcaagaggggagatgagggaggcaccacactcttttaaacaaccagatctcacatgaactaattgagggacaactcactcatcaccaagggggtggtactaagccatccatgagggatccgcccccatgatccaatcacctcccaccaggccccacctctaacactggcaaatgatttcaacacgagagttggagggggacacacatccaaaccgtatcaagagcatttccagaaggagagcgtcagatgctacaaaggcacagcaggaccccggcttcccagggaccaagttctccccctaccctgtctcagtccagaccttcttacctgccacctccctgcctggctgctggccccatcacatctctcagatcccactcccagggtcttcggtcttcaatgagaggccttccctgaccacccatgctaaaggagtccccaaccccagtttcccggtcactctgtcatagctgcctggcatttgttgcaagttgtaattatattttcatttgtttctgtctcagccatgacctatgaaggctgggaaatatctgtttcattcactaccataaaccaagtgcatgatatatcctagtttctctatatttgttggataaatggatggaaagaaagaaagataaaaaccctgagtttcacctggaggcccagttcaactggtggaaaaaccacttccctccccaagtcacacacccgccgcggcagtagggctccttggctctggaggaaaacatagctgggctgggggaggaggtggagaaggacaggagactctgaagttgacccagaccagctcttccatcattctaaaagtggggaagctggatacggtggtgcatgcctgtaatcccagctacttaggaggctgaggcaggaggatcacttgagctgaggagtttgaggctagcctgggcaacatagcaagaccccatctcatatctcataaataaataaatagtaattaaaatgagggcttctttaggaattccaagtggccaccgtatttccttcaagcattcaacaaacatcaacaggctgaggctgtacaactgggctaggtggtgggaacctgtcccctcagcagttcagagtcttggtggggaagctggcagccaggcagggcaggagaagatgcagtgtaaggggtgaggcctgaaggctgactgtccccctccacccttcctccccgagctgtgaggccctgggcaagtagcataacgtcttaaacttccacagcttgcctgtaagcaggactgctcccaccgcacaggctggcaccccctcttgttcctcaccaacaaagcacttgggcctgggccagagcataggtccacattgccatgatttcaactggtaattacaatacactgcagagaagacacacagagcactgtggacacagggagggttggagtgggctggggaatgagcagctttctgaaggaggtaacagtggaggcttgaaggagcgggaggcgtggagcagagaagcagctcagagacataaaccctcccatgcccaggcaaggaggccagagggcctgaacagctgagggcttcagcagcaggacccaggctggaagtgaggcccgtcaaggactgaacccaaccctgcctacagaggagtatctgtggccagcggcacagtcaccaacaccagcatccggtccagggccacagcctgagatagccacacccaacagaggcacaagaggacccacgcaggagccatgcagagctggaggtcgatgattttcatctgaacagggagctgggccccgaggaggacttggaaccacccaagtctgccccatctttgggggtggctgtctgtccacgcagtggccatctgggatatggagggtggcacgtttgccacagttcaggttcatccccatgcgtgcttccccaggtgttgtgccccgttaagggtcgaagccccctcctcacagcccatcctgtttcccggtcccctcgaggatctccacaggtgagttacctggcttacgtcgggtgggaggtgaagagaggaactttctagttgcttttctccagcttggaagtgaggccttggagaagcctcctgaaggggggaagggagggacggctggcacgggtcgtgaacaccatgggggaagcagagaagggcggggagttggggggtgcagggggcttccgggggacaagggaggggcactagtgtagaagccacgatggggtggggtacaagggcacaaggaggtaggaagggggaacagggggtggaggtgtggggagagggagaggggactgggacaggggtgcaaaaaggcaagaaggtgggggaggggtgcagagggtggggaggtgggggaggggtgcagagggtggggaggtgggggcaggggtactgggggcagggatggggatgtgggaaggtgggggaggggtacagagggtggggaggtgggggaaagggtactggggcagggatgggggtgcaggaaggtgggaatggaatgcatgggacaggcacaggtacataaaggtggttgggggcacaggggtgcagatggagggaggtgggggagagggtatgacagggtagggcacggggcaggggaggggtgcagacatccacagtctgggtgcaggtgtagggtggcagaaggtggttgggggtgtaggcggtggacggggtggaggttaaggcagaggcccctgtgggcagggaccctgcaggccgggaccctgcaggcctccagcctcggcacagcctgagcagtggcagcgtggcagatgggaacgtgcagaaacatgcagaagcatggcccctggttaataagattaggatgttgaacggccgacatgttctccgagactggctgtatgccacaaatggaggggactgcgaccttaatagaatgctgaacttttggaaagtggagcaaaatggagagagtcagagttggggactgagagtccccctctcgggctggaggccagggctactggtgacctgagggcttccgggagttcagagtggggcattttcacttctggatcctaaaagccggtgggcctggatgggactcattccttggcgtcctgttacagcaacaggaatgaccagcgctcctaaaggccccccacctggccctgagacctccatctctgcccacggtctggctgcatctcctggaaggttttgttttttaatgctcctgtcctggggctcttcctctctctaggcctagcacacacttccagcctgggcatcagggaaataactcaaaaccataacacgctttaaaaaatacactagccagcaactgcaacaacatttgctttgcacaaacatttcaagagaattccccagatagtcttgctgtgggggaattctagccaccaggagaaagctgcccaggccctggcggggcttggcttcccagcggtccctggccaccttgaggacaggaggcaaacagggacagacagcagcagaggggtttgaggccacaacagcatacagaatttcctggcaggatgtgtcattagagctctcctagagacggcccttaccccaccctttccttgacagcctaggacacagtgatgcccacctctgagcctcccatgcgttatcttaggtgttcacgagattgtcacgtgaatgccgaaagcctgcctgcctcccacggagctgggagctcttgaggacaatgtctgccacgtagcagggcatggaaatcttcctgagtgatttgggtgttacctgtgtggagccgatgacctttcacggtccttgcctgcctcgggacccctgttctgtcaggctgtccccatgctatccctcccagccagcccatcacctcaaagaagcggggctgtcatgagcctgcactggctgaggccatcatgagagccctcctaaggtggaagcggaagtcctgggtccaccccctgcatggcagcccccacccaggtgcactgccactcctccccctggccccatgactcaaggaactttcctgggagctgggaaagctgggaaatatctcaatttaggtcatggctataatggtacagatatttgtcaaaactcactggaccatactaagacctacgcatttcatagtatgtaaattaccctcagttttttaatttaaaaaagttaactcctggaccgaaaacagatttgagcaaaagccactgcctcagacccctaaggcttccaatggaccgcagagtcttttattcagccaaagtcagccaatggagcccaagcaatacgtttgggaaaaaaagcaatcatcaatgtaatgataaggaaagtgtctcatacgtagtactaggagacctgcctcggtgagtttctaccagcagtggcaggaaggccagaagccaccggtgtccacacaaagcctggctctttcctcatcagttctctggcagtgaggagagggcaggagtaaacacgaagctctagaacaatgtcctcttcccagccccccagctggctgcctgggtaaggtgccaggtagggatggacattacatacacaaggctggtggtactgaggggccatctctgaaggtgtgcaccttacagcaacacagatgggcacggccaaagctgctcccctcccctctggagccaatggccaccccagcagggactaagccaaagcttagagtctgcccaagacctccccaggttaagagaggctactgcaggactccaggagcttccccactccctctgacagcaacaaggccctggccttggaccagacccctagaagagcagatgttaggcagatgtgcaggaggctccagaaggttatggtgggaacagctgtgggtgctgaggagcagacaaaagcagacaggagaggagcagaatggagatttacctctttggcaagaggctcttctgaccaccgcttgccctgccttttggctgagaacacagactgaggcctggcagagagaaggccttgctatgtaagcccaggttgactcagggccagttttggccttcagtatgctctccctcagggatcccgccatgacatctgccttcataggaactcgttttccttttgcgctcctttgggcagcattcttacaatccaacagaagaattctggctcttgtggagcttcatgaagggggaagacctcccaaaaccagtatggctcaacaaagcgccacctgcccactcatccatccacccatctacatacctacccaaccactcacccatccatctactcacacagccatccttccacccacccatccatctacccattcactcatccatccatccatccataagcctacccatccatccactcatccatccactcactcacccatccatccacttacccatccgtctactcatgcacctatccttccccccaccccatctacccattcgcccatccatccatgcatctatccatccatccatccataagcctacccatccatccactcatccatccactcactcacccatccatccacttacccatccacctactcatgcagccatccttccacccaccccatctacccattcagccatccagccatccatctgcctacccatccatacactcatccatccactcacccacccttccatccacttacccatccatccactcatgcacccatccttccacccaccacatctacccattcgctcatccatccatccatccatccatccatccatccatccatatggctacccatccatccactcatccatccactcacccacccatgcatccactcatgcactcatccttccacctacccatccacttactcatatgtccactcatatacccatccatccactcataccctcatctacccatccatccatccacattcctacccatccatgtactcactcatccatctactcactcatctatccacttatccatccatccatccacccacccatccattcactcatccacccacccacccatccatctacccattcactcatctattcatccaatcatacatatacctactcatatatccattcatccatccattcacatatccattcacctgcccatccaaccacccacccatctaccatccatttattcatccactattcattcatgcactcatccatccacgcatccaaccttccatccatctatatattcatccatccatccatccatccactattcattcattcactcatccatccatgcatccaaccttccatccatctatatattcatccatccatccatctacccactcacccatccaccatccattcattcatccacaaagaaaccccaatgagagggggtgagaaggcccacaacaggggcagggtttggaggtcagtactacaaagcctgaaatgtgaggtacctacaagtctgggcttgggtatcagataatcctggatcaaaatcctggctcccttgtcactatcttcgggcaagttacttaacctttctcaacttcagtttaatcacctataaaatggggcaataataactttctcattgggttaccataagaaacagatgagaccgtgtatccagaatgcttgctctggtggcaggtacatagttagcatttgatatacagtggtggccattatccgcatcatcatcagaattggccaccctccacaccaacaaaagagtatgcattaatggggctctctattctttcctacttcatgccctttgccatgcgattttgcagtttttcctgcaaaagaggtggagcctccttccctaccctctatgaatctgggcctgccgtgggacttgttcagaatgaggtggaagagatggtgagccatttccaagcctaggcgagaagaagccttgtatgtttccacttgttctgtcattgccatggttggctccctggtcccaggacggggatgaaagatccatagagcacagctgccccagctagaccaagccaggagcagggcaactgaatcaacccacagacccataagggagaccagccagggtcagccaactcccaacgacacagacttgtgaaccataaagagaaatgacttttttttttttttttttttttttgagatggagtttcactcttgttgcccaggctggagtgcaagggtgcaatctcggctcactgcaacctccgcctccggggttcaagtaattctcctgcctcagcctcctgagtagctgggattacaggcatgcaccaccacgcctggctaattttgcatttttagtagagacagggtttctccatgttggccaggctggtctcgaactcctgacctcaggtgatcctcccgccttggcctcccaaagtgctgggattagaggcatgagccaccatgcccagtcattgattgttgttttaagcaatgggttttcatagtttgtcgtgcagtaatagctaactggtataccttcccccttcaatttccccatcccccttctccttttcccgtatcaaaagacattgattatgaaacgtctagttctgtctcccttacaaaccagaaaaggaaagacttctgcaagagatcctgtgaagcctcaacttccctgcctgcagcccctgcctgttccctggaaacaggaagtgacagtgaagcccaggaagaatgacgttgagggcaggtgggccaggcttggagatgcagacacccgtgctagggacacgtttgcttgtgtgcctgtctacttaagtacttttaattcaaggtaacccaattttcagcatctccagggagtgggctctcagacgtgggaagtatgagaatttgctgtggaaatcactgccgaggggagattagggcttccgtgaagggtgcggagctctttcctgcaagaccattagggattccgcacagcgcacgtggcgtaaatcacttcctattcaggcctgctgatgaggggctcaaaggtcgattttccatggttatgacaacaaaaactaaaattgggtcaaacccgaaagctattatcttcctccgagccgctaaatgctcaagagtaatgaggttggttgagcaatacgctccagcctgcttgcaggctgcggggaagacagacaggcccattcactgggcgggctcagccgccctgccacacctccacatgtccagcggaaggtcccagacccttcatctcgctggccagagaggctggttgtctgcagccctcaggcccttcttcctgcctgtaaaagcctcacagctaccaaagaagagatgtccaacagctccaggaaacctgagtcactggggttggtgggggaggccacttttgttcccgagtcccaccctctgcctcctccttgtcattatgacagccacaggtttgaacctgcaagagccgaggggctaaggatttgttccagctgggcccctccctctgaggaatcctggcctctcactgtggcagacgccatgccaatacctggaatttgcataatgtgcccttctccttatacattattgatttgcattccatgcacacacatgccccgcctggaacccatccttcaaagcctcactgtcaataggcttcaaattagacccatcatctcagtttatacagtatttaacaactgacctgtcccacaacttggagttattcttagaaactgccctgccttatctcaagagaaagagaagagggaaaacgggggagatatttaaagccagaagtatccctccagaattgattttgttctctaaattatgtgacagccatttattaaaatggtggatggggcatgttggcaaagctggggacacgctggcagcacccggccagggtgaagtggacagatcctggagaaatatctgagaaccctggtcattgccacactcacaggccacgtgaccactaagcaggtcccactgagccttgatataagcctcaatgtgctcatctgaaaaatggggctaatataacctatttacagggtctggagagagtggagtgagattagttaaatgaaagggctttgaaaacattaaactatattctgatacatgagtgaaccttgaaaacattaggctaaatgaaataagccagacacaaaaggactaatactccactcatgggaagaacctagaatagccaaattcatagagaaggaaaatagggtggtggggtgccagggatggcagggagggggaaggggagttggtgtttaatggagacagtttccatggggaaaaatgacaaagttctacagatggaaggtggtgatggccacaccacaaggtgtgttcacttaatgtcactgaacgggccactttaaaatcatcaagatggtaaattttatgttatgcatattttaccacagtaaaaaatgtaatgtttcaccatgatacaactgtgcagtgatgtgatgtcagttcctgtgtctttcaggaacatttatctcatgcccccagcctggaactggaaccctgcttgggcagagggagcagctccaatcttgcctttgaactggagaaaaacggggttccattccttgctgttgcctcttcggcctttaccacgactcactcatgccgtggaaaagcatggattctgttcctcggcacagatccagagtttgagagaggaggcccggcctccccactccctgtccacggggttccagcaggcttgcaaggagggggaccctgccgccaccaccctggccaacctcctccagcctttcacagagaaccctttcaaagtcctgtcccgatcagctcaggaccccataacaatatcacagactggggaccttaaacaagagacaggtatttcccacagttctgcaggctgggagtccgagatcagggagcagcgtggtcgggttttgtggagggcttttccgtgcttacagacagatgcctgttccctgcatcctcatgtggaagagagaggggagagaacaggctccctggtgtctcctgctataagggcactgatcccatcacaacggccccacctcctgacctcacttgaccctgatcacctcacaaggctttgtctacagataccattccacaggggcttaggggttcaccatatgcatggggcgcccaattcaggcagcagacccttcagattagatctgcagcaaacaagccagtctccctctgccccggagctggcacagccacccaaaagcgtctgctaacacatgggattttacatgttctaggagccatattttaaaaaattgaaaacaagcaaaagtaattttcatgatatgtgtatttaacgtaatatattcacactattatcattttgacatgtaatcaatacagggactatcaatgggagattgctcatcctctgcctcgcacgtggtctttggtaccccatgtgtgttttagacactcggccagcctgtctccacccaaactcccacatctccagctccacggctgcgtgtggctcggggctgccacactgcacggtgcaggtgagggatccctccgtgtcctgcagccccacaaccaagggacatggggccccactatggttgtaggggtccactgggaggggaagagaagccggttcccaggagctgattgtcttctgcccggctctcctacacaggctctaaagccacagctcctccacaccagccaccatctgaaggagggtgtttgcctgatggaatccagaggggtgcagagctcacaggggctcctggaccaggacggggatgcaaaacccttcctcccgacttagactccagcggagcttgtgcacacccaccttccagactccagtcaaggaaatgggaaggtgggtgggcggggtggcagggtgctccaggtggcagggtgctccaggtggcagggtgctccaggtggcagggtgctcacctcgagctcctgagcaccgtcccctgagagagttcctgtgaccaaagacatcacctgcttaggcagagggagcagccaccccaatcagggcttgcccacatgcaaccgttcagtcgcgtaagcgtttgtgacattggcatgtaccccaatcaaaacctggcatagcaggagccgccgtaacaaagccgttggcagcagatatttaaaactcctagcttctccctcgccgagtcagagatcggccatgggacgcttccctcccacccagagtagctcgctcactagcaatgtggcacatttctttacaacacagcattagtttcctcctgttcctgcaacaaatgaccacaaatagagtcgctcaaagcaacagaagcttcttctctcactgagggagaccagatgtccaaagccagttccctagttgaagtcaagatgtgagcatggccgagctccctccagaggctccaggagagaagcgttgcctgcctcttccagcctctggggctgcagcaactctctggcttgtggctgcatcgctccagtctctgcttctgtggtcacatggccttctcttttgtctgtgtcaaatctccttctgcctctcctttataaggacattggtgattacatttagggcccgcctggataatccagcaccatctccccagctcaagatccttcacttcatcacacctacaaagtctgcctttgacatataaagtaacatccatcggctctgcagattagggcatgactatcttttgggggcccttattcagccaaccacagatatgcactaaaaacatatacagatgcggacgtgcgtgagggatgagatggtgagatgagatcggttcactccctggtgatgaggcctggtgatgtggccatttgccacaagaaaatggttcttggggagattctagcattgcctagtgagagctggcacccaataaggtaaagcacccactggccggccagctgctctgagcatccccaaagctcaggcatctgaggcccagggcaggcagagaagttcacaaggagatgccacccagaagctgcttaagtggaacagtgggaggattagactctggcaccacaaaggaactctatcagctattagcaccaccatcatgatcgcttcagaagaggatctacagaagaccccgcccaggcccaccacacccccgctttaaacatttcagtgtacgcagccccatcccactgccagcacctgcctggggtccagagtacccctggagcagcctcagtccacgaacaacagaggtgggtgtataaataccccagctccctctcccctgggctggagacccctaagctgtgtgtcctacacttgccttcagggtccccagtgggattcagcttcacttgcccgcagcagaccctgggctgcctctcttccctgtcccacctccccagctcctcttctgtctccttcacctcccccagtgcttgcccttagatactgatggcggagtctgcttctgggaaaagccaaactgagacatgggcactgtcagagcaccaaggaggtaccaccaccagctcaggaatgggagcaaaagcagaggtgtatgagcctggaggtgtctgggatgaaggtcaaaggggaagtgaagaggtagctggtgagacagtgctgcactgctctgatggtccccacaccgcacgcctctaagggcagacattttgaccatgatattgatctctatcgctgctattaagtgcttgatgctgtaaacactaggcacgatgctgaatgcatagcctgcatatttcactgaatccaggcaaccaaggtggggtctggcatggcccctatgttatagctgaggaagcaaaggctaagagcataactggcccaaggtcacagccctcctaagtggctacaggtggattcaagcctggacgcctcccccttcccttactcccatatgcaccaaacacatagatgcttatggcaaacgttttaaagttcccaggctaagaataacagagaagtaagcgtttgaggaagagtaagggaaagccagaagagagatgaggaaattgataccacatccctgtggaccttgcttcgcaaagggaatgcccccggacatctccacttctagactttcctccatcagagccagaaaagggaggagggagtgccaggaggagggtccagaaggggtggggagggacttgagggggccagtttcctgcctggcttggctgtgtggctcttcttgagaagcagcaaaggtacacggactcggctcatccttggctcccacgatcactgcatcacgcatggggaaattcaaggcgatgccgagcggccatctgtctgttgtggggagctgggccagaggctgcgctgggtgacctccacactcccagccccctcttagattctaaatattgtcagatgtcccaagaggagtgctccagtggccccctaccttcctgcagcactgccccgggccacagagcctctcaggccatgaccggggagctggaccccagatggcgaggaaagagccaaggaagccaattgccgcggccaggcctggggactggagtgctgagcgggccagccccttcaccctgttctgtttgtcagaggttggaagctggggccaaggtgggctcagtgagtctggatgggagacaggaccaaagcaccgaggagaaacgaatcaggatgggggccgcagaggagcggcggccgcttccggcagaacatggaatcctgacgcagcccagctgggaagctggaacccttctccagtgcccccacgatccagaggatgggaagttctagagacaaagcctctaacccagtcaccacaggaggcctgcgcagatgtggcctaggatgggtactctgggttgttgcgggctggcaagcatctgcctgagaaatcgggatccaccctcaggaggcagctggagcccgttggtggaatctgatgctgcctgggagccctgggggcaggagagcggaggagcctggccggagggcctggtggtgatggcagacccccgggggaggctggagacacagccccattctccacaccctgcagcagaccaagcggtgctccatcccgcctgcttcttatcagacaccactgggtacctctgccatcccatcagacacaaccgccagggcctcagagcactggctgcgcccacaccacctgccactcaggtgttttaaatggggcagtcaccccctgaagacccctgtctcctctcagcagtataggcctaagcagggcccgagacttataattctgaggttggagggcctaaatttggcgtccatgggggcgccacaatggggctcctgcttggcagtccccgccccacatgtcaggtgcccgcgggatgctgggtgggttctcgtcaactccattctcagccccagggtggagacggggaagggtgggcagtcctactcccctgccattgtccagtccatatcccaggtcaaaagagattcagaagaaacagaagccctcccctctcctcagacaagagcccccatgtcagacaagccacagctggtactgccactcagagacattggccacatcttgcatcctcaggagatgtccatgaggtctcttcactgataatgagacccttctagaagtttccagagacttctctaatgaccaccccaaagggagagtctcctctctcctttacaggtgagagaaccaaggcacgcaccaatgaggttgcacagagcaggccaggaaaacccaccctggggaagctgagccttcctgggcctgggcagcccatcacagtgacagggccagtgagggggccacacactccagcatctgccaccagaatccttcaccagacagcttttctctagctcttcccaccaaagacctgaatggggcttaggaacatggatgctgttgaggacacaagtcagggtctggcccgtggatttaggagcctcaatgggaccgatttgtaaactgcctggtaacatggaaaacaccagcagactccagaggccacggtgaaaccggggcagaaaggaaatccctgcatgaaaatgacggcagcccctgcgctcgctggccttctagaaaagcccacccggtgggccgctgggaagagcaggtgccatggaggccagcgtcagctccccgagagggggttcctccagcacaggggccttccggagggaggcttagtggctggtgacccagtgctgccaccccagccacattgctccctggaggtttgccaacattgggggcgtcctgagccgccagcccagcccgacctcctccgcctgcctgcccgaggctgggccgccgcccaccgcctccctgaccgcccgaggccgcccactgcctcccttgttgttattcttctcagtgcctccctcctctctctgctccccgcacccccacaggcctctgcagcaccgcgctggctcggccgaagctgactggagttttaatgactcatctggggttggggtgggcgctccggccccaggtccacctgctggatccttgccagccagcgtcctctgccccagcaagggaagcttcgggctgtgcacagccccctcgctgggagatttggagagcccacccggtataccgtgcacaccccacactccgcacaccccacacaccccgcacaccccacacacctgctgctgccagcacagccatgtgtccccagggcagagggctgaggcgggcggcaggcgtccatgcgaggtgcccctggctgcatccctcggcttctacagggcacaccaaagccaaggacttcttgcatcacagattttaaaacttctcctgcagcctcagaccacacccccagtccacatcaggctctcaacctcacctgcaggtcagaaacacctggggggcttggagcctgacccacgtccgggccccccgaaggctgacgaagtcagagcccagggcaggcagacactagtattgtaacagcgttccagctggttctttggccggtctgaatgacccagccccagggccccggccctggggtctaaatcaaccactgcccccatgaggttgtggagggatccgggcaaggggctgcagagccgggacacagcaggaggacagcggggtccccaaggcggcctggtcgataggagcgccagagccggtgtttcagcgtgggtggctgtctctctctaggacgctggagctacggaggctacacaaacggacaagaagagaagggccctggtcctccccacaccccctccagccccagagcacatagctcagcaaagccaggggcccaggctcccactctgcgggtatatttgttcactgtgacctcacctgcaggtccagaaacacttggggagcttggaaactgaccgatgctcaggccgacggagtctgagtccagggcaggcaggcacttgtatcgtaacagcgttctagctggttctccggctggtctaaatggccataccattccccaccccaacccctccttcccttatactaacggttccatggcagggtcggcgcctgggagagctatgaggcctcagggacccgtcccttcctttccctccgtcatccatcagccgtcgcaccccaggccctcggtgacagctggggtagagcccagggttagggtgagggctgggagctccgggctgtgcatggagggagaagccaggagcccagggccttgccctgtgcttccatggactcaaggactctccacccctccctgagcctcagcttccccagttgccaagagcaggcactgcactatgtcatcagcaaagatccttccaatcctacttacttgggcatgacgcctgggagaggaggcacaaccaaatattttctaatatgcacatattaccttcataacccaagaaaaatcaattttacaacaggagtcaatgcagaaggagcatccacagcattacctctggtcctcaagtggcggcgtgaatggcctcacgcaactctgccaacagcccggcccacccaccagaagttggccctgcaggtcagcagccaagtctcctgcagtggacgggtggtggaattgtctggtgtcgacagaggtgccacggaaaagccaccagcccttcccatcggcaacaagttccatcctcccggccaggccccgggactctcggctccctgtaaccagcaagccctgtcccgccaagcccccactttaaatactttgtacctgacccgctgcgcacccaccgccaggtctgacaagcacgcaggacacgacaaggggccaaggcaagctgcccctgctgctggcacccagccaccctaccctcagacgacacactcatttctgtgcaccctcagccgcaccaaatcccataaccttcatgttcggggccacagggagaggggcaccgtgcctgcgcagcccctccatcccaggcatccattaacattccccgtgtaaagttggggctgtaattacagcaagtgattaacaggcctgaggtagcctgtctgggagggagcagattaacagcagagcttgggaatgcctgcgctcacctcagaaccaccagtgcatcttaaacagggcccagcgcccctacgagcgggtgattaatggaggggatgaggacggaggacgtttccctggcatccgtcaccaaactttttcctttgggcgcctcccttgctggccaggcacagtggagggcaggggagggcagccaggactcggggcgagcacctggggcttccaccaggggcctcgctctaccttcccctgggccaaagtgtacccccaagcagcagcatcctagggagaaggagagggagatggaagcaaagcccacagggccgaatgcatcccaggagccaagaacctcggcctcctttgtccaaatagaaaatctgaggctgccccccagaacctcctccagccccaggcaacattcagggctgtgctaacagggaaaggctctgccaggactgtcctcatccacgcaggggcaccaaggtcaagcagaacaactgcttggctggcagagggctcacgggagcctccacctgggctgtgtcctcctgagggtcagggaagaaacgggaagggactctccctgggccaggaggtgtttgcagggttgtgatgtccagatatccgcttagacgaaactctgtgtgtgtgcagtgtcgtggggtgtcatgcagtatgacatgttacctatgcatttaggttttaaactacccccttttcagtgcctaatatgtgtcggggctggggacacaaagacagtttagggatgatcgtcctgcccatgaggctcttggtcttgcagaggaggagtcgtggaaatgggataattgctggagggctctgtgagcaagagctgcacagcaaaagcaaaggggatgcagcagttctgcccgtgtggggtgagggcagcagcaggaagggcttaatagaggaggtaaccctgcagtgaaccgtgatgtcaggtgagaatttatctgtcaggcaacatgggccagatgcatgttaccatctagcacagccccatggccaggggacacccacccggatacatgttaccatcgggtacagccccatgaccaggggacgcacacccggatacatgttaccatcgggtacagccccatggccaggggacacacacccagatacatgttaccatcgggtacagccccatggccaggagacacacatccggatacacgttaccatcgggtacagccccatggccaggggacacacgtgcagatacatattaccatcgggtacagccccatggccaggggacacccacccggatacgtgttaccatcggatacagccccatggccaggggacacccacccggatacatgttaccatcgggtacagccccatagccaggggacgcacacctggatacatgttaccatcgagtacagtcctatagccaggggatatacacccggatacatattaccatcgagtacagccccatggccaggggacacccacccagatacatgttaccattgggtacagccccatggccaggggacacccacccggatacatgttaccatcggatatagccccatggccaggggacgcacacccggatacatgttaccatcgagtacagtcctatagccaggggatatacacccggatacatattaccatcgggtacagccccatggccagggaacacccacccggatacgtgttaccatcggatacagccccatggccaggggacacccacccggatacatgttaccatcgggtacagccccatagccaggggacgcacacctggatacatgttaccatcgagtacagtcctatagccaggggatatacacccggatacatattaccatcgagtacagccccatggccaggggacacccacccagatacatgttaccatcgggtacagccccatggccaggggacacccacccagatacatgttaccatcgggtacagccccatggccaggggacgcacacccggatacatgttaccatcgggtacggccccatggccaggggacacccacccggatacgtgttaccatcgggtacagccccatggccaagggacacccacccggatacgtgttaccatcgggtacggccccatggccaggggacacccacccggatacgtgttaccatcgggtacggccccatggccaggggacgcacacccggatacgtgttaccatcggctacggccccatggccaggggacgcacacccggatacgtattaccatcggctacggccccatggccaggggacgcacatgcagatacatgttaccatcgggtacagccccatggccaggggacacccacccagatacatgttaccatcgggtacagccccatggccaggggacacccacccggatacgtgttaccatcgggtacggccccatggccaggggacacacatgcagatacatgttaccatcgggtacagccccataaccaggggacacacacccagatacatgttaccatcaagtacagtcctatagccaggggacatacacctggatacatgttaccatcaggtacagccccatggccaggggacacatacctggatacatgttaccatcaggtacagccccatggccaggggacacacacccgaatgcatgtcaccattgggcacggtcccatggccaggtgacacacacccagatacatgttaccaccaggcatggccccacggccaggtggcccacaccaggatgcatgtcatcatcaaacatggccccgtggccaagtggtacacatctgaatacattcaccattgggcatggctgtgccatggccaggtggcacatacctggaagcattcaccatcaggcacagctgccctgaccatacccccatcctcctgtggacccccatccccacagtgggggcctttcttggtgaaatggcacagcagggtggtgaaagggcctccttggaaccagactgcttgagtttgaatcacagctctgcctcttaccagccacgtggcctcgggcaggctgcatgatctctctgagctccagtgtcctccactccacagtgggagccgcacaagcttgcctaccagaaagaaccgtcagtgaggcggtacaggcgctgggcacttcacacagcctcctggggccagcacacagagccatttctcccgagtgtggttcctgggtctatgggggcccgcgtgccctagtgggcctctgtggttggccttctgggcctgcccctgcacatctggtagccagctcacccctgcttcccctagtctaacttggaatttggctagggctgccaatcaagatgccctgcccaccatgggcatgtgaccagacctgccaatccttgaagcactgtgattggtccaggggcaggcacgtgacctcagccaggccaatcggtgtactttcctggtatttacccctctggagttgctgggtggggaccatgtgtatcagacttgcctatgacagcctcctaccatctccaccctgtgctggacagaggaagccactggaagcagcagaaaacgcggccaacactcctgggattctgctcacctcccagcgtccacacagccaggcaccccctcaccccacccttcccaacagcatgcacctctgcagtgggctacattcagaacatgcacctgggtatccgacacacgggtacacactcggcggtcacgcagacatgcactccctgggcccagcactggtccaagcagtgggccactattgcctcactgagtcctctcacacctgccaggtaggttctagaaccaccacattcacagatgaggtcacgggtgcgtggcctcacacacccaggtggcctgagtcacgcctcgttgttgtgatcttgacaaagcaccgctgtctcctggatctcggcaaccacacagcgatatcctgcccttttgtggccactgcccgacaggctctggggccacaggcaagtttccctggctgccaccacacccctagtgtccctcagcaacaccacagccacccctagtaaccctggccctaacccacagcatctagcacaagcctctgggtggcatctgcatccccccaggccatgtggatccactggaccctggagcatttctatttggttaaggccacagcttgggaaggacaaagatggcccagtgcatgtgaacgtcctctgtgcactgtgaaatggaaccgtgcagaagctgtggttgatgtggagctgttctcttgggacttggtgggacaggatggggagctttccagaaagaccagacaggaggctggggctcggcgctgccccattcctaatccccacttccctagagccgtcacctctttgctgcctggggtgagggaattctcccgactctccaacacaccttcgggtgtcctgaggcagaagttggcctctgcctgggtccctcagcctgggtgcacctggtaacatctggccccacccacacatctacgggaaggtagaacttggcagaagggcagaagaccctttccggaggagcaacactcaagccaagtgctgagcttccatctggatcagcagagccctgctctggtgaagccctgtggcaagcctcccactgctccccaggccaggtcacctcatagctggggcccctgggggtgtgcagtgcccagcctacagctgggagacagcacatggcccagggcccagtgatccagccactcccccatctgacccccacgcagctcccggccatgtgtcaagccacttgtaccccaggtctctcccatctcctgtgttacactgatccccttccctgagacttgcaggagctcatcgacagggttacaagagaaccgcaatcggagaagagccaccagcacatagaaaaaacgagaaatgctggccgctggcagcacagttccttctcagagtctctgctctgctctttccttgaggatgttttctcttccctccatcagaaaacctgtttgcctttcagtttcaacccaatgccacctcccacattgcccctaagtacccaccctcctcaaggaggtatctgccccttctctgggtccttgctgtggcaaccacacaccatgttagtgtggtgggcaggcattcgaggctcccggctgaggttgcaccgcttcagagtccgtcgccacccttcacccctgcaccgagccccacacgctactagcacatcacagggactaaactgctgctgggtggattggctacaggccttctccagcaaggaacatagtttatcttcttccttccagaaacctagctttaatcgaggcgctcacctccaggaccgaagtcaaggtgtcctcgactccaacagccttgagtccaaggctctgtgtgcctacagccaagaacatttcaccaggccaacagagagagaggagagagtcagagagagagagcagagagtccgagagagagaggcagagagagcacgcacagcctggccaggagcaccagctgctgctgtatcagtctgcattctctgggcatgacaaatgttcaacacaacaaacgaagaaaaatgaaccatttccattgcctaaaatactcccatccccacggggcttaagataaaagtaagaagggacagacattgaattgaagagaacgcaggtggccatgagttctatgaaatgcccacgtgtggccacactcccctccctgggcacccctgcctttctaccagcatgcccgggcctgccccctgccctggagaaccaggatacccagctcctgggcagagagacacaggctctcaccccatgtaggattaaatgaggctaactcaaaagagctgcttcataaatattcacgtccagcccagaggggctccaggccttagaaagagccagagctctgttcacgccccgaggtcagagttcatccccagaggaggtcctgggaccctcattcctctaattactcctgagagcctggcccagatggtagagacgggatggaaagtctcaggtaactcagatgagaagctaggagcagcgagatggagccacagacttggggcctccccaggtgtgccctccgaaagcacgctggagcaacacactgtgcatggatggatggacggacagacggatggacgcgatgcgctggaacgatccctgccccaggaagaaaggaagctctgacacacgctgcaatatggatggacctcgaaaacgtgacgccgagacaagccagacacaaaaggtcggatgtcgtacaatccacagtccacccctcggggagtcatactcgtagacacagaaggtagaatgggggttgctgggctggggatgggaatggggagccggtgtttcataggggccgagctttggttggggaagatgagaacgttctggaggtggatggtcacgattgcacggcaatgtgaaggtgccgaatgccactggctgaactgtgccctcaaaatggttcgtgtggtaagtgttatgtcatgtgtattttatcacaataagaaaaaggagggccgggcgcagtggcttacgtctgtaatcccagcactttaggaagctgaggcaggtggattacttaaggtcaggagtttaagaccagcctgaccgacatggtaaaaccctgcctctactaaaaataaaaaattagccgggcatggtggcaggtgcctataatcccagctacttgggaggctgaggcaggagaatcgcttgaacccagggggcggaggttgcagggagccaagatcatgccactgcacatcagcctggactatacagtgagagtctgtctcaaaaaaaaaaaaaaaaacaaacaaaaacaaaagaaaggaaggaggaaaatgatggaggatgagacgaaaggaagagttctgaactttggaagcgggagtggggttcaggggcccccattcctatggctgagctcttgctcagtgcttcaattactcagcagggagagagattgtcaggacaactcaaaaactccaaggtgcagt

SEQ ID NO: 505 - DNA, 198072 bp, Homo sapiens
  source 1..198072: mol_type = genomic DNA
attttatattagaggagggagagaggaagataaaaaagggagagggaaggaaggagagagaaagagagaatgatggcagaaatcaacggaggcggaggcgtagtttcctgaggctagaaactcagtctggggagacatgaaagcgtcttttggggaattcaagtagttgctaggtctcagggaatccatcttcagaattttcctccgcgtggttgcgggaggaaaatgagttgagtggagaccctgagcaaactcctctccaggccatgcggcatcctgggctctggtttcccaggcacgcaaggcacgcttttctctacttcccggggacgctggcctcaggacttagaactcctgtatgccggacagccggtaaggtctactgggcggccgctttctctggtctttctctgctccgtagacatttctgtgtcaggtgcctcgcatattcgcacccacgcgccagggcattaagccgaaccttgcttggtggctctcagccttgaaaggccgcaggatgtccgcgtccacagctgtgaaccggtgagtgcaggtggacgggcgcacgcgggcgccagggtaattaacagggcttcagagggcgtgacggtgaccgtacgttgtcggcgaactctcttttcatcctttacatttccacggagatttggccaataaataacaagaataaaatgtacgcatggttttgtctttgcgctcgtggggtcgtggcggggtcttttaagtgaagagaaaaagaaaccagaaacccacggtggccccaccggctgcttccggggacacctgaaatcagcagctggaactgacaatttggagagccccggggatggtcatctgagacctgggttacaatacaagtctgacctcggggcgagtccaggctttcttcccctcagggtcgggtgcctcaagagccagtggcgctggccgggctccagccgcgagcagatgccaggcccggcacactttgcacgggcgatgcgcgcggacgtcccgggcgcgctcggtccgcccggcttggcaggagctgcgagaggccgcgcgcaccgtccccagggacagccggaggactcagggctcccgggtggagcgagagcgcggcggccgaccgcgggctgcgtgtgtcgccttcctcacgcggtatgctgcgccgtggaacgctgggctacggaccctgagggtgcactgtggcgggtggcgtacgccgcgctccctccccgcttcctgcgcccagggtcggcgggcagagttcctgggtccagcttggcgctgagcagcccccggccgcagagcagctcccgccggtcgggagacgccccctggcccccgcccccgcgtggccggccgggacgagctggagcagcgggaggaggcggcgccgccaggactgcctcctccccgcccctcgcgtctcctccccgcgccaccgggaaggacaaggggactgggcacggggaccccggccagtgagcgcccgtggcccgggaccgcccctcccttgagctctctcgccgcgatcccgggcgggtctcgccccgcatggtgctggcagcagccatgagccaggacgcggaccccagcggtccggagcagccggacagagttgcctgcagtgtgcctggtgcccgggcgtccccggcaccctccggcccgcgagggatgcagcagccgccgccgccgccccagccaccgcccccgccccaagccggcctaccccagatcatccaaaagtaagaagggagaagggaacagggaccacgggtgcgcctggggacacgccccgagagccccctttgtggcttcatttcccgtccctgctgaacttcgctcgccccccttgggtttgaagttttctcgtaccccctctgggcagagtcggtgtccttctggctgtttgttaggctggaaagaggggagccaagttctttagggaaaattattttgtttttccttatctcctttctcttctcttcaggaatggtactagatattttgaactaaaatagctcagattggggggaaatggcccagcgactgtatttcatctttctggtcccaagaggacgctggaatggagagtcgtgcgtgagtgtgtgcgcgcgcgtgagggtgtgtaagtaaaatgccaaaaattaaaccacccttcatggtgcccctgaaaccaaccagtggaaagggaggtgacagtttgtaaacaacatgttttactttgccctgaaagtgtagacacttttcaagaaggccttttcgaagagtttagctacgcaaccgttttccattaatgttaccatcttgtgactcgggtgacctgtgcgacttgggtcgtgaattctcaggtcggccttcccaatgcttgagaaggttgggggtggttaataagccccgagaggctctttcagcccgtttgaggaacatacaagtaaaaacagtgatgctttgtattgtttgttcttttgagatttcgtgtgaccgtttaaggcctagaatgttggtttatttgaaggatctctgctctcctaagggtttacccagtttgtaatgaagtcttcaaaactagtttaataagtgtaggaaagtgaatgatgcgcacctctgcgaaactgacaacactaaataaatacacgcaagtacagcaaaatttacccttatggaacacagcagaggttttctgctgctccgctgatgctttgagtcctgtaaatttaataaaacttagtaacagaaagaaccagtgatgggtgtaaatggaagtaaatagcagttaagtatttattgttttgaagactgatttatctaatagaaagaattgtgaaaattcaagtttaacattagaaaacgctggtatcatatttcagaacaaaatggttccctatgttgactggtggaatactgagtctccacttgtgacaactttttgctttaattggatattttatataactttcaactacaaacagtttccaactattccaaaatgaaaatatttcatattattcttttctattgttttgcaaattattcagccaatactaaatatgattgacaatttatgtacatcaatacttaaaatttctctttattccttaatataaatgtaaagcaacagagaaaaactatttaaaatttaaagtttacttagtgaaaaatccaatttggccaattattaatttggaaacatctgatgtgcttcgtacggagccagtgtcttgcggcttgaaatcaggctgcatatgaagttaattgaaattgcttcggtattgtaattaccctgcacttttctattacttacttttaagtagaagaaaactgggaactttatattcacagaaaagtctttgtagaagggcgtctgattatgaaatactgccaggttgaaaataaatatcattttatggaaatggatcatttaaagtatattttatttgcctcacataataaataatttaccctctaaattcatcccccattttgaaaatcccatctttggaatatctaattttaaaagaaaagactcagcttttcaaagatggccccttctacttgaagggcaggatggagacctcaagaagcgcctcatggctttgcttgctttacattggtgacggatcagtgttcagggaccaggtcccagggctgtgaatgtgcccataggatttgatgtttgcgcactgacgtttcagtctttctttacaaggatgatttggagcttgtgctctccttagtacccactgaaattccgctggaaccagatataatgtcgcaaacgctttgtaggtccatcttcaatgcgccgaaatttgagcaggttattttgaaactgcatttgcataagtccatctgagcaaacatttttatggagttatgaggtgtggtttgcatcagccatctttgagaaaatatagtggagctactgtgctcggctgcaaaacaagttgtctgcctgttgatttggggaattttgtgagctacagctttggatgaaattctcctctggtggaacacatattaaatattattagagaacctctattttttctagttattttagtgaggtcgttatgtaactggtaagaggagaagttttgattgctttcaaaatgatggcgacatcaatcttcttcatgttgcatagtgcgtttgaagattacaaacatttttccacttactgtctatgtttactgatttttattagtaatggcttttattttagatcaaagtcaatgactttggaaaaaccatagtaacaattataataaaaatcagttcctgttcacgttatatttggtgtttagagaactgccgtatactacatttacaaagataaacacatgaagcgtgatgactaataatgagactgattttgtttgttttatggacccagtcttagtacttatgaagattgcatctagagttaatttctctggagtacaatgatttcatttccttgtcattgtatttttagcttccattaagaatcatccataccttttctgctcttgtttactgtaaagattatcagccatgtatagacacagataattaatattttataagatttttattttaaatatgcattctccaaattggctaatatagaggcattattgtatataaaacacgatttaggctatttaggaaacaagaaatataaataataccctaagaggagatttgggataagttaggaaatcagaataatttgagaacttaacaaatatatattttttccatactagcagaaataagaaaacattgacattctggtgaatgttttataaggatttatctcctccaacatttacaatgttttatttttaaaattattttgttttaatcgtgagctttaaagtcaaacctaatcctttatttataagaagttatttattaaccttgatgaacgtcagaaatttaagttttaggttgccagttttaaagcactcattagaatgaaaacagagccactcaattccgtgtgaaatgttgaagttagctgtcagatggaaccacgaagtataccactagccatggaggaaagaaaccaaacacgtgcacccctcttatgaagtgaatgtagaggtgattttcctaacttatttgatttgcagcaaaatattcctgggtaatgcgtggcatcaggttgcatatttaatttgagtatagatgacacttttttctgtattattttttaagcagtgaataaaaataattataaacaatagaaaaagttttggtttagcatttgatggctagtgttacctgcgtgtaaatgcttgtagttaatgaaaacatgaatccagctttgatctctttgatctatagtcttccgtatagcattagaacactggctgtctatattttcagagcaaagtgctcccctcactcggaatagaaaatgttgtaagtagcaactccgatttacagactctaattttacagacattctgcagaaggatctccgtgtaactgttagggagtcattcgcaggcaagttgtgtatgatgttcacccactttgatgggtatgctgacaattacatccagagtcagagagaagaaataagaatttgctaaaaagggacattccctttcattcatacttggtcctttctggaaagaggatggaatttctaacatctgtgccagttaacatcagtttgagcccaattttaggggaaataggaatacacttgtagaaggaattttgaaaattttaaataccatcttaaactgcacataagacaagcattcagcagggaaaacatctgagaggattaagcctttaccccaacagggaagaaaaggggggggtgctattttcttagcagcctgaatgattcttttgcttatctagaaagctttccaaagttttatcagaaaaagaaattttgcttgagggtttgttgtgataagtatttttagatagtatgtataatcatttagttgtgaatttttctcaaattgccaaagagatcagtattatgaaatgtagtacattattcccattagtcacagtaaaggactatgcatatggtgcacacagagctgttctaatgccagtgctgtaggggggaaaagaagaagaagaagaatttgatcaccctttttatttttctatccatgtattcttttgctacctccttcgcagtttatctaattaataatttaaaaagcccaaatctgtccattggaatgtgaactctgatctgttaagatctctttgccagtcctaatagtcaccagggggcagaaaaaaaccaaccaggattgactcacagtgaaatgattccacattatccagtttctttctttccttctgatttatttatttatttatatatttatttatttatttttgtggctttaagttcttgactccagtttaaactaatattcttccccgcccacaacagccggtcctcaagtgaacaaattgatatagctcaattcacaggtttgataaacaagaatacacaaaatgttgggaactggggtttaatcaagggatagaaattaaaatggactgaactaaatatggaaagtaagaattgaggaagcttgagatactggagttaaaacccaaaagagaagttcagaagtaggacacccctctcccttcatctgtcctggtctccctgccagacaaaagcttgaatggtctcctacaccacaaaatcctacttaatctgatttttatttcctgccacagtgattatttaattggggatggtctaaatgatattatttggtatattttaacagggaaaattgctgtggatctgcagctagtgtgagtgactggtagctgcgtttagagtgttgaaaagttttgcattaagtaaaatgatccatattacagaatcatggcaaagatggtaattagtggtttgcagaaaggagcacacggcagttccctttctgtttaaagaacctggctggatcttgagaatatgcgtgttatcctggatgcctaatactgcatgttcccaccagtgagtagactggcagattctgatcctaattaagaagacatgtttttgaatcaggaatgtgaatttggtttgcaacaccaccacgggggtattgttggtgagctgatagtttgactggctccatgggtggtcactgtttaaattccacccaactaaagagctgtacaagattttagtcttcaaagtttacacacagcaagtgtggggagaagttatcactgccagctgttgggggaggaagtgaaagtgagaaggacccctccccccaaataacttgtgtgtgttttggatatgttgcatatatccatttaatatgataaactctttaccgcggtggaagttacagtcaagttgattgatcttcctcttccccacagctcctgatggattttataagataagtaagtcccctgatggtttctaaggcaacttttccaacttgctgacagcagatctgtaggggagatggcacatattggtgctgatgtactttatgggcaaaaagggagcagttaagcaacttgcatgaggatgtgttcataactcacagctcagttggacaaatcaatctttccatgtgttcagaaacaaaaggcaggggggtcatgcatgtgtttgggagtggttatcaccccatgaagatagtttccacgccaattttgccttctttaatgtggtatttgctttaaggctgtaccagggccacttgcttctgccttttctttgcacctgctttctcttgatcacactaatgacccatcagttctcagttaccacttcccactctgacccaaacctggaaacctccaattgctgctgtctggacatcttaaatactttttggttttgcaacttgtctgtggactccttcccgaatatgtttttaagttttgttaggcctgcccttcaacctgccctccagtgtcaggagtagactaggtaatatatattttaaagatgcattggtttcactaaatctcctcctttggtttattttgaattaattattgaacagaatgatttaagatcagtctgatattttcaggtgtaaaatgagcatctttgctctaagttaattactgggcttctgtcgaggagtgccacagaggaaaaaactctggactgggagtcagtgacctggacaagccaattaacctttctaatctagcctctccagggattggaaatgatcaattgcagtttcttccaagaataaaattaggtggctcttgtgcaaatcttagcaaaattgtggagtgatacccaatgtagaatgcctccctccatctacttcctccatcacctgatacggaatatgtcccacatcaattaaatttagccatggacacaggtacatatttgtgacactgatcacccatgaatacaacaataaccacaaaaagagaatgaaatactttctctagcattcacaaagaatatttggatcagtgacataattttaaaagtcagaaaaataaacactaatgtcagtgaacaggaaaaggttttatactgttcttcaatctctaaaaatgtttttggtataagaataattttttggaatgttaaagtaagtactttaacatttactttaacaaactgaaagtagcactttcagcttgggagacagagataataattttcatgtgtctgaattggattgtgttaaacacaggccaacaggagtgtgtttggtgacatcgatggtttcagagtcagagaatgtaaacataggacccacaaacgttttacaggagcacggctgtggctactgcagggactcctgaaccgtgacgcacagtcagttggccgcagagaccagcctggagctcgccctaaaacctctttgcagccttgcagatgtcatagttgtcccaaagctgggcctcatgcttccgtgtagcctcactgaatcaggagaccgagtgtttccagagccaggatgtgggcgctgtggggccagtgctgcatcctcctgcgctggcaatagcagagttgtggagaaactttatttggtatttgaaatgatcaatattttaaccttctgcataaaaagagagagaagtctgtgattaaatcttgatttaaagtcttcaaatatgtacatacatgaggatgaacataagcatatttatttcaacactgtctagaaaagtgaaaattagaaaccacttaaatgtttctcagttggaaacataaaccatgtgtaggtataaggtcatgtactactcagccattagaatgatgctgctattttgcattgattgatatggaaggagaaccatataatattaactaaaaaaattacaaacagcatgtatgcaaagatctcatgtttgtttttgaaaagatgtgtatgagtgtgtgctggtgcctgccagccttaaaaaacatctgaagaacaaatgtaaagaacattaacagtagttctaactctgggtggggcaattagactggtttgtctttttttcttcctttttaatatggtctatttttttaaaattcagtgagcatgtattacttttacaataaaagaaaacaataaaactatttttttctttatctatttcttttcctaaccgtctgtacctgcgagtatttcatttttaaaaacagcaacagaaggagtagacatttcacattggtattgcactgtcttgaagactgagctgccctttagcatcttacattttagtcctggaaggtagctgagagctgttttagcccagccttcctgtttttctaggtaagacaaatgagcatcagagaagtcaagtgaattgttgaaggtcacacagcgagggagtcatcaggctgtgatgagaatccctgtatttctgtcttatattttctgctaagccaccattttgtcatcctgggaatggaggagagagaaatggaggcattcataaattaaccgtgtatgtaccagccttagtctactcacttcccctaagagggttgagaaaagcatccttggttgtgttatctcctctcaccccatcctgctcacccacccacacgggacttttatgggagtggcagtagactgggtctctcctgggcatctcatgctctgttccttcctgccaaacagaagccaaccatcacattttcttctctgctcttctttgttcaaggttactctttttccccagatccttaatagaggaaaaacccagtacctaccttcctttcatacccagaaacgtcctcttaacaccttcaagctgtggtttaaagatgaaccttttgagatgtaaaagcataactaatatttaaaggaaacaaaacacattttacttcttactcccaagccagttataggaatgcccattattatttctgccaccccaattcccactctgcttcaaatttgtttcaaccaaggatataatttggactgtatttttaaaaagtaaaccttgctttgcggggactatatttgcattcttgcttgcccttgagtgtgctctctcttgctttttcttttcctgaactatttgaaagtaatttgcataactataattttgttatcatagctcaggaaattagtcttatttaatttttttctaataaacactaggtttttaactttcatttgtcagataatctctcatatagctgatttttttttttttgcatttgtttataatgtctttctctttttttgagacagggtctcactctgtcactgaggctggagtacagggtgcaatcacagctcactgcagccttgacctccctggctcaagcaatctcccacctcaaccttccaagtagctggtactgtagacgtgcaccaccacgctctcctaatttttgtattttttgtagagatggggtttcaccatgttgcccaggttggtctcgaactcctggacttgagcaatcctcctgcctcagcctcccaaagtgctgggattacaggcatgagccactgcaccagccatttcttctttttaatctaccaagtatacccacctctttctactttccaatactgaagattacaggctagttgtcttggagaatgaaccatgatatggctgtgactgttgtttcttcatgaccagatccaggttaaacattttggcaaagataggctaagagtttgaccccttgtttaacatggcggccaccggattgctccattgtagacagacatttttctgtttgtgataagtagtaagttgtctgcagaggtgctaccatgagaccctctgaatatctatgttccaacagactttcatctggtggctttgtcttttaatttgattaaatatttaaggagcaattgtaatgaaatatgtggatcactttagaatgcatgagtttggacacacagtttatatcaaacagccttgcaaatatgtttgcgttgtatcaccccatagatattatctagagcctctggatttttctagtcctgacttcataggacttgatccatgggtcagctacttcccatttaactctataagagacattccatctcttgagttgcagtgcttttaatgtccattttaatgctaatggaaataagtggatactgatgtaatttgtactgctcatcagatttttttgggtatcctcttgaagttatgttggttctttgcagaagccttttaactctgttttcaaaatcactgtatgaagcaggctttaaaaatgactgatgacttgccctggtgcctaaactgggtgagtcttggggctggtcagtgactagcagtttgttcatgttttttagatttaagttacacagctatttttgcctgttccactttggtactcctattttcatacacaaaatatgtatgggtgaaaaaggtggtgtggagtagtgaaaaggagcaggagcaggcatgatctatgttctggattcagctttgccactactaaccctgagcatcagtgttcttatctgttaaaggaagcagtaataataaagtgaataacaactaactcgtacagagtgctttctgtgtgccagccactattctaaacagttgaggtattttcaatccatttacttcaacaataatcctgtgaggtaagtgttgttattctccccatcatgcagatgaggaaactgaggcacaaccttactaggacccaggaaagctaagaaaaatagtatttatgaaaacatggtggaatggggcttggaataaagaatgttatactaattcaagcaatcctgtcttctctgtgtaaatatctgtttccttaatttatagaaaatccatcacttacaagaaaatattatagaaaaaaatgactaaaataaatctgaaagtaggtcaaatttaagacaaactaagcaatccaattaaaacttttttttcctgtttccgtcccccacccccgcccttttttttccccttaaaactttaagtacagctttggtttaaagtgaaatctatatcccaatttaaattccatgaacaaatctgactctggcatttgattcactgtcttactctgcttgttatgcatgttaaacaagacctaaatttgatgctcacagagagcacataaacacttataatcctctcagcatgtgctaaaataataacagacacgatagtttgatttgcaaagtgtgtctgccaacttccaccagaccatttttgaaccaattcagaaaaccaggattctgcaatgattaaagtgtccaaggctcctattcatagcaaaaggaattcctgacttgaaacaagtacacatgaagctcagctagtctctgccagacatactttttgaaccatctttgcagacattgttacaagtgttcttttgctttaagaaaccatggtctgtaacaaccagactgaacagaatccataaactggggaaggattgtgccttttgatctgcgacagggtttacagtaaaaatcctttaaaccatgagtttctcagtgtatttcaaatagcaattcaataatgctaacaattcagaggtctaataataaaatttaaaactttttttggtcttttttttttcaattttaagaggtataattgaagtgtggtaagctgcacatgtttaaagcatccatcaggatccattaaaccattaaacaattgagataataataaacattgttggctgggtgtggtggctcacgcctataatcccagcactttgggaggccgaggcacgtggatcacctgtggtcaggagttcgagaccagcctggccaacatggtgaaactccatctttactaaaaatacaaaaaatttgccgggcgtggtggtgggcgcctgaaatcccagctactctggaggctgaggcaggagaatcgtttgaactcgggaggcagaggttacaacagtgagctgtggagatagcgccattgcactccagcctgggcaacaagagcaaaactccatctcgaaaaaaaaaattatcaccccacaatgtttcttcatacttcttataatttatctttccctcttctccttatccccctcacattcagggaaccactgatctgctttctttgtttgcgtttcctagaattttatacaaatgaaatccaagtatgtactcatgtgtgtgtgtgtgtgtgtgtcttctttcactattttaaagtgcataatttagtgacatcaagtacgttcacagtgttatgcaaccatcaccactctccagtaccaaaatggttgcattgcctcaaaaggaaacttcatacctactaagcagttgcttcccattcccacctctccccagtccctggaaaccaatctgctttccatccctatggatttgcctattcgggagatttcatataaatgggatcacataatatgtggctttttgtgtctggcttctttcacatggcatcatgctttcaaggttcatccatactgtgtcatgtgtcagcacttcatgccttttcactgccgaataatactccattgtataggtaccgaaaacgttttctttgtccattcatctattgatagacatttgggtttttccacctttttactattgtgaatagtgctactgtgaacatttttgtacaagtttttgtttgaacatctgtttttggttcttttgggtatatatcttggagtggaattggtgggtcatatggtaattctttttttttttttgagatggaatcttgctctggcacccaggctggagtgcattggcgtgatctcgattcactgcaacctcttcctcccgggttcaagcgattctcctgtctcagcctcccaagtagctgggactacaggcccatgccaccacgcctggctaatttttgtatttttagtagagatgggatttcaccatgttagccaggatcatctcgatctcctgacctcgtgatccacctgccttgacctcccaaggtgctgggattacaggcatgagccaccatgcccggcctgttcttttttttttttaatggccatcctagtgggtgtatgaagtactatctcaatgtggttttgatttgtatttcagtaatgactaatgatattgagcttcttttcatgttggcttgttggccatttgtatatcttcttttgaggaatgtctactcaaatctatcatccattttaaaactgggttttttacattcttgttttggaatggtaagagtctttgaaaattctggagagtaggcccttatcaggtgtataatttgcaaatatgttctcctattttatgggtttgcttagcataatgattttgaggttcatctatgttgtttcttgtatcaaaactttgggccttttactttgctaagtagtattctgttttgtggatatagtgcaaactctttatccatctgttgatggacatttaggttgtttccaggttttggctattacaaatgaagctcgtatgaacattcctttgcaagtctttatctggacatatctttcagcttctcttgggtaaatttctaggccaatgatattttaaccttttaggatcacaaatattgtacataagaatcattgtttgggtgaaacgtcttcaaatttttattagtatgtcattgaatggagcatgttaatgtaaccctttaaggtgtttaaagaatatacactttttcatctttgttttcagaatcaatcactcattagtttttttttcttctgttgatgaatcttccttcaatagtttttcatttggcaagtaattatgaccatggaagtcgggacacaagatgaaaaagacaacaaaactgcagaacttcaaactgaaagaaaccctaaaaatcacctgagtcagctcttttattttacagaaaaggtgatgaggtccagaaaggagactggatttaccaaaggccagccgagtattagagcagttcggtggagcaggggaaacttacacacctgtgagggtaatttgacgtctcctagccatgatgcaacagtgctggggggtgagtgaatggcgctgtgttttacagtctgtagcattcacagggcactttgtttccttctaggttatcccagttaatcctccaacaaccctgtgaagtaggtagggactaagtaactaggagtagctcagggtcacctagccaatgatcggagatcccgggctcagagccaggccttctgactccttccaagttgcgtgccctcctctttttcgtttgaatttcctcctccttgtccctgcccactgccgtccccttagttcaggcctcccagctctacccccggcctcctgctggattgggctccactccttctttctctgcagcagcacagtcttgaccttgtcctctgcttgctggaagccctgctgtggcttctcctggcctttaggttaaggttcagactgcatggaaggcctttccagatctgccccactcagccctccagctccagaacttcctgtcctctcttggctgccctctttccctctcctcaactagaacattctgaattctgcttagacctcacctcttccagggagctttccccaaccctaagcaggaaggagggctgagtgaccctcttcctgtaattgtctgtggctcccatagtagcatttgtccgtgctctcctcttgcttgtctcccataaagaccatgcaaagtccttgcagtcaaggccactgccactcacctttgctatcctcatcacctagcagagcccctggcacatagtgtgttgaatatctgggaatgaggaacttaactgcaactgaactttcaatctaactgacttggtgatgagaaatactagtcaggatgctctcatgggtgagacctgatgtgacgccaaagcttggttttctccagcttatgttttatttggactgcctgtctgaaagggctagacagacatttatgttcagagaggccatataagaagaatataaatgcggaaagtcataaacttcagctctgctctgggctccactctcaagccactgtgtgaccagaggtagcacttagcttcttagagtccacatgggttaaagggggaccagggtatggggcttgttcaaacagtcaatgagatgacaggtgaacatgccttggtaggaaagcagtactgaatacatgtgtcctcatgtaagccagctttttgtctcatgctgtcatctccagccagaggccagattgtgtgcaggcaatttccaggctgaatttctgagagatttgatccaaataggataaatggtggaaatgaccactaggaacactccttaaaacctgcttgcatcaatgctttcaatgatacatttctgcatctcaaaaaaaagtttctaagccctaagctagcatctgcctatttcaagcaatttctgttcttttttttcttttcttttctttcctttcctcttcctcttcttcttcctcttcctcttcttcctcttcctcctcctcttcctcccgttccccttccccttcctcttcttcctcttcctcttccacttcttcttcttcttcctcttcttttttttttaattttttttttgacagggccttactctcacccagactagagtgcatactgatcctcccacctcaacctcccaaggagctggggctacaggtgtgcaccaccatgcctggctaattttttttgtatttttttgtagagtccggttttcaccatgttgctcagtctggtctcaaacttctgggctcaagcgatcattctgcctcagcctcctaatgtgctgggattataggtgtgagtgaccatgcttggcctcaagcaatttctaaaataacacaaatcaagacaacagcaacaccaagatactgctttattattgccttgacatttgcaataatgacagtttaactatagcagtaataatgacagtcgacttgtggcagcttaaaaaaaaaagaagctgcctggaaaataagtgattgctcacgattcctcagggagacttactccaaccaccctatttaaattgcatcttgaacccatctcttcccatccaggctgtcttattttgctttatttcttccacttgttgtcttctagcataaggatccccaacccccaggccatggacgggtaccaggctgtggcctgttaggaacgaggccacacagcaggaggtgagcggtgggcgagcaagcgaagcttcatctgtatttacagctgctctccatcactcgcattactgcctgagctccgcctcctgtcagatcagtggtggcattagattctcataggagggcaaatcctattgtgaactgcacataggagggatctaggttgcatgctccttatgagaacctaatgcctgatgatctgtcactgtctcccatcaccccgagataggaccatctagttgcaggaaaataagctcagggctcccactgattctatattatggtgagttgtataattatttccttatatattacaataaataataaagtacacaataaatgtgatatgctggaatcatccctaaaccatcccttgccaccatagtccatggaaaaattgtcttccaaaaaactggtccctggtgccgaaaaggttggggaccgctgttctgacaaattatataatttactcatttattatgttcttactgtctattatggctcctttcaccctgcccccaccacataagctctccaatggcaggagagttgtactcagtgatttaccccccagggcctaggagcaattcctgacacctggaagatgctcactaaatatttgttgaatgactaagtgaactataggtaaaaatactgactttagtgattgttatgtggtggcatttgttccctctctgagcccacctaggatatgaactatatgggcttcagggtctgagttttgtgattcaggaaactgaaagtggaaggtgttagaagattgtagcctctgctcctgtggggttcttggaagtaagactctccctgggcacccgtgacttggtgctcttctcatggcccagctccagcagttgccagtgtagccagaaccccttaggctgggatctgacttgtgtatttggtgggatcttgatggtggagggagagcagcaggcctgggctcagtccctagacatagaggccaaaaaagattggaacaaccgtgtgtccagcaataggggattcgtgaataacacttggctacatcctcccaatactattcggaccatctctgggtacggatacagagaagtctcaagaatatattactaagggcaaaaatcagggtgtggaaggtatatacagttggctgccttctctgtaagaaagcagggtgagaggaaggtgaatatgtattcatatttgcttcagtgaccagagggtgagatttgagagatgttgaaagtaggggccaggcacggtggctcacacctgtaatcccagcattttgggaggccgaggtgggtggatcacctgaggtcaggagtttgagatcagcctgaccaacatggcaaaaccccgtctctactaaaaatacaaaaaattagccaggcatggtggtgggcacctgtaatccaagctacttgggaggctgaggcaggagaatcgcttgaacccaggaggcggaagctgcagtgagctgagatcatgccattgcactccagcctgggtgacagagcaagactggtctcaggaaaaaaaaaaaagatagtagcattgagtggcagagtctatatgctgtctaatcccagctgctgggaggacgctcaagggagatgatcttcagtggtgttggtgtggataggagccagcacttgaatggtaccattaaattccaaatagatctgtgctttgttagaagggctgtgaagggatgaggaaagaaaaaagcactgagaagctctccttccccagtaaactttcatttccaattcaggaagccacttgcggttcacaaagaccaaaactaatctatcatattttcaaaccgaatatttaacactgtgctgacttctctgacatcactaggggagacagagattatgtgtaaagtgccaaactgggtcaggcagttccttgagaacatcactgccctttctcaaagaaatttcctcggtctaaaatgtagagaattgaatcagatggctttcattcacatttctctcagaggtttttaattaaagctcccaagattttggaaggattaaagaaaacttgtcagcatgtaaaacatatcactttttggtagggaacatgaaatgatacaacctttatggagaagttggcaatatctagcaaaagtacatgtgggttaccttttgaccaatcaatcctattataggatctatcccaagatacacacacaaaaattttttaaaagacataggcacaagcttctccatcatgtcactatttgcaatagcaaaagactggagacaacccagatgtccatcaccagggaatgggttgagtaaaggatcgccctccttcctctatactgatgtgtagaacacagtgtctgagattaggcagcctgtaggctctgatcttcctgttcatccctacattggacatccctcaaatctggcccctctggtcactgaagcaaatacaaatatatattcaccttcctctcaccctgctttctttctttcttttttttttaagacagagtctcacactgtcgcccaggctggagttcaatggcacgattttgtctcactgcaacctccgcctcccaggttcaagcaattctcctgcctcagcctcccaagtaactgggattactgatgcacactgccacacccagctaatttttttgtattttagtagagtcggggcgttgcccagactggtctcgacctcctgagctcaggcaatccacctgcctcagcctcccaaagggctaggattacaggcgtgagccaccacacccagccatcaccctgctttcttacagagaagatagccagttgtatacacattccacaccctgatacgtagaacacagtattctatgtatcaatgacagggaagggggacgatctccgtgtactgctatggaatgatctccagggcgtactattaaatgaaaaagcagagtgcagaaaaagcggatggcatgctatctattatttaagaaatatacatgtacttgcttatacttttttaaaaatggaagaataaaccaataaaaatatttacctgtatgtgtaggtaggaaatggaagagtgggtcagaggtagaagctagacttctccaaatgtgttttgttttgtagatttgactttggaagcttatagatgtttgtcttaattataaaaaaattaaattcacatggacaaaagtaatccccaaaaatcaagactaaagtgaaacaaacttatgtatcaagttggtggtttaaccacacaattatttcagataacttgaaaacacaattaatttaattatacatccctagtgtatatcttaccgtcaacgtgaatgccaaattaatcttgagctgttttcagtaatattgtaagtaaaaatgttgatagaactgtactgacactaatatatatccacacacacccacataaacatatgagtatacataataagagcaattatgttgcaatcattagaaaccaaaattttcagtatacaaaaacagtgacaattttaccatcaagatattaaatgaaaatcctgtaattctaaatttgaattggaaatattagtaagaactcctgatgtattttcttttaaacaaataaaaaaatttttctaaccttgtctactgaacagcctagaaataatgacaaacctagtagcagtaagcacctgtaacatccagattatggcctctaagtacattttttctgctaaaaagaaactaagaatccttagaaaaatgttgattccaggcctggggcagaaagtgtacaagatgagctggaatatcttgttgtatcagaaagcaaagaagctatcaaagaccacggtgtcctgtgagaagtactcagaagctaattgaaggggctccccctgtccaaatattgaacaatttgggcattaaaaataataactatagtggatttacatacatcaaatatattaacatgtgcaaaatctataagttaaaaaaattcagtagtttcggccgggcttggtggctcatgcctgtaatcccagcactttgggaggctgagagggaggaatcacctgaggtcaggagtttgagaccagcctgaccaacgtggtgaaaacccgtctctactaaaaatacaaaaattagctgggtgtggtggctaacccctgtagtcccagctactctggagattgaggcatgagaatcgcttgaacctgggaggtggaggttgcagtgagccgagatggtgccactgcactttagcctgggcaacagagtgagactctgtctcaaaaaaattttttaaaaaagaaaataaataaaaataaaaaaataaaaattcagtagtttccactatagggtgctggggaaccaactttcatcccctttgtcttcctcctgtcctccttcttcagtctctctctctctctctttttagagacagggtccttgctctgttacccaggctggagtgcagtggcaccatcatacctcactgtaacctggaccccctgggctcaagccatcctcccacctcagcctcctgagtatctgggactacaggcacatgtcaccatgcctggctacttttttttttcttttgtagagataggctcttcctatattgcccaagcttgtctcaagctcctggcttcggtgatcttcccgcctcagcctcgcaaagtgttggattacaggcatgagtcaccatgaccagtcagaaaattcttcatagaagaatgccgtctaataaatacagaaggaatgaatattagcattttgcaacccctggtgaataatgagtttagacaatgtggttgttaatggctactaagctgttaggtgcagctgatggcgttctttataatggagggatcaggctgataatattcaaacccactgatcgatcttaatgtcttggcaggcttgagatttaactaccagtttatagaaaatacaagggatgcaggaacatgtacaaatgatatcgggcagatgaatcaggtaatcagaaaatgggacatgctgcaggcctggtttccttaacaaataaattttaagaatcaaaatagcaggaggggttatctgtagattaaaaaggacttaaaatacttatcagcaaaatgtagtatataattcttgtttgggtcctagctcaaaacaaatctaactgtaacatgtatacatgcatgcatatacatatatatgataatctatgatatatatgataactaagatattatatttgaatagtgaggttaaagaattatttattcatgtattatttatttgattatgtgaacattaaaaagaatattatttattagttacttatttatagctgtggtaatggtattttgattatgttaaaatacagaagttggctgggtgttgtggctcatggtcgtccagcactttgggaggccaagatgggcagatcacttgaatccaggggttcgagaccagcctggacaacatggtgaaactgtctctacaaataatacaaaaaattagcccagtgtgatggcacaaagaaagaaagagagagagagagagagagaggggaaggaaggaaggaaggaaagaaagaaagcagttatactctagggttgtatactaaagtatagattaaatatgatatgtctgggattagcttcaaaataatgaaggggggtgcaaaataaacaagattggccatagattgataatttttgaagctgggtggtgagtacatggaaatcattatattattctctctacctttgtataatttgaaagtttccgtaataaaaagttaaacagaacaagacatcagctcagccacttggccagttctgttttcagatgtccttaaatttaatattgggctgtggagccgacagacccttcttaaaaatcacctgggggctgggtgcagtggctcatgcctgtaatctcagcactttgggaggctgaggcaggacgattgcctgaggccaatagtttgagactagcctgggcaatatagccagaccccatgtctacagaaagtttttaaaaaattagctggctgtggtggtacatgcctgtagccccagctactcaggagactgaggtaggaggatcatttgagcccaggaatttgaggctgcagtgagctatgattataccactgcactccagcctgggtgacagagagagaccctgtctcagaaaaaaataaaaaacaaaaatcacctggccagcaagtaggaggctgagatcctaactcacatctgtctggctccaaagctcacagtctttccatcttaccttacagaatttatgtctctcttggggctcaaactattgtaggattgtttagattgaggattatagggttttacaagcagctgtaatataaacatgggaaaattggggcaaggcaaatcaagaacaaaaactgccaccaaaacatcagagtcggtcttcctttgagggcgggaaatttatccaaggataagggaagaaaatggaaatagaccgcattcctcccactgtggccttattgggccctttctgttgccaccatcctgggctttggattgagagagatctgggttaggtagcacagcctgttacttaggatgtgtgtggtcttactgttctgtgccacagttgtttcaaccaacctcatttggctgttgtgaggatgacatgagattgtccatatgatgcttaccacagtgcctggcaagaggtgaggtctctgatgttcatttagaaaagaagactgcagtgcattcaccaagatcctaagaatcccaaggctgggccggagcttatgtgtttggacatccctgtgacgtgggtacccccactgaaccccatgatattctccagcactttcttggggaccttgggccaccttgcctaagtttgggatgatcatttagcctgaatgaggaggctcagtgctctaaggatggcattttttctacctggctccattttattttgtcatgtggcttgatgggcatggacagtggggaagatcctgcctcggtgggtgaatgaaaggtaagtagctagatgactagaagccagcttgaactttgccagctttgagattggaaggaaaaggtgaaattgcctgctcttcctgaagcaagcaccacattttctctcctttctaccttgtttgcctcttacagccagaacccagcccccttttcatcactaatctcgtaacacacagggcttcatcctggcagtgtcgatcttttcattagccctttaagaatgactggcaaatgcacttgtttgagtcatttgatcacctgggaagtgtctgggagccatgccttggagtgcctcactgatcacaaagccatccagtgtggcctttgattcctgggcccctggtgtcctgctcactttaccccccatgcatgtgacctgcccactttctggggcttgggtgtgagtgagtggtgcagggaagctaagccagagggagccctgatttacgaactgtccggatttaactgaggctacagcacttttattaatagaacatgctgcatttcctttttataaaaatatgaagatcactgcgctcaggaaaatgcctggtgactttctgtctttagggcatgttcatcaccaggctaaaattaaaagtgaagtcaggcccttcttgcatctatttttaactaagtttagcatatgaatgtgaacgtgaagtctttctttagatccccctaactcaattactgacgtatgccaagcatcccgcctggaattccagagctgtgtctggggctaccttgggtggggaggccaaaagggaattagggaccactagcctagccccctgctatctgactgtgtgcgtcttcacccatctcagcttcacttactttggaaggttaaggtgcagccagtcataatactgaaaagcataaaacaagggaaaaactaaccaaaccaaccaacctatggccattttgtgatgcgtaaagtctcccctaattggcacatatttttctagggggctccaatttagaagcagcgacttgggttgaaggggagacactggattataggggagaccttgtcattcaagcagaaattgcgaatggccccaacataccaagggagacttgggacaacaggtggagggagggagaggaaaaaaaaaactgaacaagtgtcgttcctgcccagagagtttgcgatgagtgatgagagtgccagagaaaccttttagaaaccctcttaaattccctctttgaaatctttttcatgtctgctctttgaggactgtgaagagaggggagggtagaggcagagttgatcccaactcttaagattctttggcctaatgtttcacttgaaggcagagactgacgaagttcttttttgaacttcttaggacagttccctgtggttacttttttagtataacaattaaaaaaaaaaaaaccaaaaaacctactgatcattttaagtcctggcccttgctttgttttgtttgaaaagtgacttttaaaatggtgacttttatggaaaacatatttacagtttgttaaagttgtgtcatttctctttgcatgtttacatgtatgtgtatttaacttagttgtcttgaacctcataaaggtgttgtggtttttaagcagaggaaaatcttccttcgttttttctggaatagcagcaaagccatgatggagaataagcagaagattaatttaaaatactggttactttggctaatccactgacggtgagcttgcttatggctggagaactatgaaagtgtttccagatagcctgagagggaagcactgggaaggagtgtggcaagtctgtatgcgtgtggcggggtaggggggacagggttgtcttttggggaataggaatgatatttaaacgaccagctcctccatgtattatttggattttctgttaaaagcaataaacttgaagtaagacgtgtttacaggccactacaatctatctgaaaagcctcttatggttttttgcctcccattcaaaaaccacttacgtgattgtatgtgcctttcaacaaaactttggattcaattacaacacttgtaggctcagaagattgctttcaaatctgaaaactttgcaccttcacttggttacagtactttttaaaaaatggagatacggtcttgctgtgttgctcagactggtgtccaaaccctgggctcaagcggtcctccagctttggcctcccaaagtgttgggattacaggcatgagccactgtatctggcctggttgtagtacatttcaagggactggctttcccagccaaactgacatttttgggtctgtccagttagtaaaaggtagggattggggtggcaagagttgtacattgacacagttcttaagcacacagtgactaaaaggtactctactggcttttggagaaggcttagaacttggtcaatcgacaaactcctgattaaaggttgctgaattaaaaataatatgccatttctttgaaaccattcgatttcaccctatttagttgttccagaaatgtttgctttggttttaaccatgacccaactttatttagtaagtctaataattcatctctttgaaaccttttagtttccaccttattttttttttgaagagtgatttttttagatggtgatttttgtgtgaaataatatttacagtttgttaaagtggtatcatctctctttgcacgtttacatgaatgtgtattcaatgcatgttgtcttgagttgagaatttttgtcttgatttttccttgcttcaacttgatttcctagggagtctaaaagtttcacaccttggagttttagagtagattcaagaaatgatctagctcactcttgtctctttcccagggactgttggttgatatctggcacagacagataggaagtgaagaatgtggcacatccttagactgcccgttggtgagatctgaaactaagtttctcatgactggactgtatttctttagctgctgggtgtgaaaagccccagacattggcttctgcttctttcaccatcattatgatttgtgggcattgatgctaggcctggaatccctgcagcattcatctctgctggggttctctaatacagcggctgagaacggtgctaattccagctgccagcatgatcctccttccctggcaagagggagccccgctcagagaacatttaaataccgtagaaccatccctgttacaggtttcctttgggatgctcttgacgcaggaaatatggcttattctcataaatactttgagatgtacttcagtttctccaaactttatgcataacaacacgactgtaacaacaaaaagggaaattcttgaaagaaaaaatattagcagtaatctctttgtcagattgttatttttctcttttgtgttccttccttttatttttggtcatgtgcatatattttaaagtatcacacatggttttacattctattttcctgttaacattatgatgtaaaaagacttttcttgcagttgcatcctcttcataatttaatttttcatgatggcattggcgctgccaaagaaagtcactttcccatgccaggagaaaagaccatctctcctgtggctgcctcgaagcccccaggcctagaaacgtctccaatcaggaaacagaagcctccagtggatcatcttcagggatcgctggagaaccacgtgggcatgtacacatacctcctcactgagctgacttacccaaagttattattcacctactgatggacaatgatggttctagtttttctgtcttatcaatactatagtaatggctttcttcatgcatgtcattttggaatattttctcagaatgggattattatttctaagcgtatgaatatttttattgcttttgatatattagccacattgctttacaataaagttgtacctgtttaaaaagttagcagtaacataggaggatattggtctcacaataactaagcggaaccactctgcccagctttgaattccagcttgacacttggcatttaccagctgtgtgaacttctgcaaagtatttaacctacctgtgcctcagttactgcctctttaaagtgggagtgacacagtacccacctcataggtctattattgggaatgagtatttgtatattgctcagaacagtgtctaccaaagtattatgcattgtgcgctcgtgaaacaaacacctctccagctcaagattttttttaaaaaactaatttaatagaagtaaaatgacactgtttaagatatatatatatatgtatatatatcgacatgcttattaaccgtatttacaagaaacactccctttaaatctctttattggtaaagatatcttttaaaatgttaatttacagaagagatccattctggtgtgattattgatattatgtaggaattctttttcagcttttacagagttgctatccctttagggtggagtctcatcaccaaaatatcacctgggacccgaggtgctgaggctcataatcagccacttagctctgaagacttcaaattcaccccagagggacaaacttagggggtattttagggccctattagggactcttcttcctatcttgtccgatgacggctctcggaggctcctggttttgatgtctggcattgcttttacccggtgggcttcagggagccgtccctgccgcgctttgcgtttctccgcgcacttggacagggttctgccacgagggaggcgatgcctggcgccgcgggtgggggcagtggtgagacttcggcccctggtggccggagaggtcgcagcacttgtcagtttatggctccctcggctttccccttcttaatccgctttctgctgagctctccgaataattcaaccctcgtgtttgaaaactagaagcctgagaggtctcagcgagacagtcaaaggggaggctcccctcgccgagtgtcacccgggaccctgcgtccccgctctgcagagaccttctctccgggctgctgccgtcctccctcgcccggcggagcttccgtgatcgtcagccaaagcccccggggcggtgcgccgcaggcggtcttcccgggtgttcgcggaagctgcgcgctcgcgcccccacggttctccagcgacccctgaagatgcttccgtccgcggataggggacgtttcagacctggggtgggcacagcggtccccggtgagatggtcttttctcctggagtgggaaggcaactttcttttggagtgccagtgcccccagagtgctaggttgtaccgtggacttgtacttgagtttttcaaataaagcttgacacatacttagtatagagcagtagaaagcagggaggaaaaactcgtcatgggtccactatctaaaatcaactgatatttggaatagttcctttgcttttttgtctatacatacgttagatttattttttctagtttttaattgtactatgaagctcaactttgaactttgcattttttctcttattattattttacaaacatacatactggctgcataatattctgtcatgccatatacagccactctacttttgaatatttaggtgtttttttattttcattaaaaaattctgcagtaaacatctttctggctaaaacttgtttccgtattaggttatagtctcattatcatagggcagagtgagaatgtttttaaggttcttgatacatattcctgaatggcttttctttcttttttcttttttctttttttttccttttttctgagacggagtcttgttctgttgcccaggctggagtaccatggtgcaatctcagctcacagcaacctctgcttcttgggttcgagcaattctcctgcctcagcttcccaagtagctgggattacaggcacacaccaccatgcctggctaatttttttatttttagtagagacagggtttcactatgttggccaggctggtctcaaactcctgacctcgtgatccacccagctcggcctcccaaagtgctgggatcacaggcgtgagccaccatgcccagcatccaaatggcttttcaaaaaatttgtataaatgtttactcctgctagctgtgcttaagtgtttatttccggccagcctcaccagcaccaggaattatgagaatactcttaagataatgtcactaaggccacaggcgaggagagcttagaaggtactggctgctgaagtctgtgtgatctgaaacctagatgtatattctgcaatctgcttgtttccaactccccacattctgaggacagtggcctatattgaaactggaggaatgaggtttacttgtgtttcagggattgaagtggtactagaggttgtgttggattgctaagttcagagagccatcagaaattgttatgagcttgagtcacataaaaatggaatatcctttactgtgggtggcatagctttttagggttggcttcctaaacattttggggagaatgaatctaccagcagagaagctttcctttggcagtctgagggtgtatcttcctgaggcaaggccagacttgaggatattctaatcctccttcctgcatttttatattgcaatttcttgccaaacttgctgcctgaagagagacgatatctctttaagggtgcattttagttcatttgtgtgtcaggtgggtgggaagtaatataaaactcatttatggctactcagtctgcaaacatattggaaggaagggctgggctttaatatctgtgtaggatggaagtcatttttgagttatagtcaattcttatgttctgtaaaatccattagaaaacctgtacccgtatcagttcacatattctgcacctggctctcctgttcatggggaattgcttacaacagggaactcttaaaaccaagactgctgtttttgccccactactttcaggttagagcaggattccagtgtcctgaagtttaaacacattctgagcatcctctgagaatcattcccaattccaagcccatttccagacgatgagcagacttgaattacataacctgtagctgcacatttttgtcgtgaccacgcaagctcaataatgtctcccaagtcttgtagatcactttgaagctcactggattaatggtgttgaatctgtttaatccaaataatttgaattgcatcaggaaacctgcatattaacaagctggtaataagtgcaggcgttaagattgatcactgcttaagtcttcaagatcacatacaaggtctggtgtttttgaggctgtcgatgtactatattttttagattctttcttgatttcattctgcactcttgacatttaaaataatttaaatcaataacttcagaattctcccaccggaggatatgcctatttgatgtgattgtgtgtctgtgtgtgtgcacacactagctctgtattattgcctatggaggacatagaaatatatcatatactgtcctcaaggagcttgcaaccaagttgtggggataaggcaaacaaagtcaaaatatctaatacacgttccaaggcaggatgcaattctgtatccatggtacattgctgattgctgatgatgctctaaatgctgactctaaatggtggactgcaatttgtctggaagaagaacaatggatcatctgtgtttgggggagacttcatggaggtgggatttgggggagccttgaagaagtgagcaagttttggataggtggaagtgaacttactggctatacccggaaaagagcaggatgggaataaaggaaaagagagcctgttttggtgaataagtttaatattgaattgtgatagtcaaaaaaataggtaggatgatgggctaggtttgggaggaggctccaaagttaagaagcgaggcttatccttgagatcatggcctttaccacaaccagcaccatcatcattatgagcagctgtgtcttgcattcttataatgtggttctgaggactttacatgtagtatcttatttaatccccaaacaaccttatggaacagataacaattgttatgtccactttatagcagaggaactgggatataaagaagtcaaccaacttccagcgggtaaggtatgtgggcaagcaggggttcagatgaactgaatcaggcagcttgctttcagagtctgttcttcaccactgtataatactgtctcttggtgcttgttgaaagcccctgttgagattaacatagtccccctcaagttctaagggagccccgcctttcaagtcagacagacctgggctcacattctggctctaccacttaccagctgtgaccttggaaattacttctctgagccttgatttgctcatttatgaaaaaggaagaatatttacctcaggttgttgggagcattaaatgtgataatatatataatcatttagcagaatgcctagcagagagtaagcaggcaggaaatgatagctgctatggcttatatttcacagatatatgtagggttataatgcagtctctgagaatgagaagcagtgagggtggacatgatttaggtagagtttacttggtagtcacctgcaatgataattagctaacggatagtgggcgctggatttcttcttctggagcatcccaggaatggactatgaattccagatgtggttctgctttgctccaagaactgactgcatttccttttgtcttctaaaacccagagggtgaaaccaggacatttccattgtactgaaatttggcataaaatctggtgccaattgtacatcccaggggctgaaatcaggatatgctgaaattcccagtgtcctcgctctgctggttcccacttcctgacggcgctgacagataagtgccctgcatctcacagagagagaaaaatagatatttggaagtggtatcttttattgcctataaagttaaacaatgcacgaaacaattataaccaaggcagagacgtttagacaacatgcataaaaggaaaaaaacagtggaagagaaactttgctctaagatgaaatgctaattctaactatcgctctcagaatttatggggcaacatcacttagtacttcttacacttgcgttcctgcacatttcaaactgttcatatggtagtttttcttctgtatgacattctgcaattgtagagtttttctttatattacttcattcacaaatttcaaaattcacaaagtgtctatcaattaggaagaacaacttcttgtacttttctgatttgcagtctccttggttgtgacaaacctatttgttcttgtccctgtatcgttgatataatccaacttggcttctttggaagcaacaaatgctattttttttgcttcaaatccaatattggtttttaaatttgtggatgcaagaggctataaagaggtttaaaatatatgtagcttgaaaatattaatgtttttaaaaaatctcagagtcactttagaattttaaaattttcaagtaaggctgcaatcagatagatacttgtagactgtcttaggctgttttctgttgcttttaacagaattcctaaaacaggataatttttaaagaaaccaaaatttatttattatagttatgggggctgagaagtccaaggtcaaggggctgcatctggtaagggccttcttgctggtgggaactctgtagaatcccgaggtggcatagggtatcacatggtggaggaggctaagcgtgctagctcaggcctctctcctcttataaagccaccagtcccactctcataataacccattaatccattaactatgaatatgttaacctataaatggattaatccagagcccttatgacccagtcacctcttaaaggccctatctttttttcttttttctttttttttttgagacacagtctagctctgtcaccaaggctggagtacagtggctccatctctgctcactgcaagctctgcctcctgggttcacgccattctcctgccgcagcctcccgagtagctgggactacgggtgcccaccaccacgcccagctaattttttgtatttttagtagagatggggtttcaccgtgttagccaggatggtccctatctcctgacctcgtgatctgcctgccttggcctcccaaagtgctgggattacaggcgtgagccaccgcgcccagccaaaggcctcatcttaaaggggacaaatattcaaaccatagcacagaactatttggtgctaaatggtattttgggaaaactggagtgttacatattgtttaatttttccaaatttctgataaaacggaagatcttagatagttggtgtgttcgatgggcatgtatctcatgttacttgtcttcatgttgtagacatctctctaaaaataatgataccaaccaggctggtaaaatggctttctgaattgttttactcgagtcagaggggatttgcaccctctagatgttgctccttcacagcttaaccctcggggaacttcatttttaattcattcaactgaaagaagtatttactgaacacctattatgtgctaggtgctgtcttaggtgctgagtgatgaatggaataggtaattcttatggatggagcttcctgtctagtgaggaaaactaacataaaccaaaaaaataggtaactataaaacataaactgggataaataatattaaggaaaagaaaggatttctttcaaccttatctttcttatagacaatgtggggaaatagagctatgggagtactcaaaagtttatccacacaaaacaaatccctataaaaacctaaccaaagagcaaagattaaatgtaattatgcaaaaaaatgtttaggtgtcaaggcatttaaatacattactttgccattaagtggctatgagggtgtcactaaatggaattctgtttcaagacgtacttgagctcatagcatgttgagaccatgatcttctcataatttggttcactttgattaaagcagcatcatgcccactgcagcatcatcagagaaaggatctcctgagttaaggacacccatggaaagcatcctattgtgtgatttctcccttattgttcatttctgggaaggtacagtttggttttggaaagcactcttgagtgtgcaaggccgggggagtctggggtctactcttcatcctgccacccactcccttgatcaatgaacttggcttctctgagacttggagatttggtttccacatctggaatataaaggtgttgagcctgatgaccttgaaagatttttctaggtctaaattttattacagaagcagtgggcaataggagaatgtttggtggtagattcacttcatatctaatgaagatgtgacattttcatgatatgctgcagtagagggagcactggtccaggagtctgaaagttcaagctcagcaatacagagacttttggaatgacttggtttatgttcattcaggcctggagcacagatgggttcatgctttgctgcaacccacacttggagataaagaggctctgcagtggtttaatatgcaggttctcggttcaaatccaggatactctgctgaggagccatggagacctgggcaggaaacttggcctcctggagcctcaggcttgaatatatgaaatggagcctctgcttcttatttataagtactcctgtcttcctcccaaggttggcactaggatgaaggctgtataaagtgattagcacagtatctggcacatagtaagtacccaataaatgctcattgtcctttttcttcttttttttatttttaattttttttagagatagagtcttgctctgttgcccaagttggaatgcagtggtgtgatcatagctcactgcggccttgaacgcctcggctcaagtgatcctcttgcctcagcctcacgagtagctgggactataggcacgagccaccatgcccagctaatttttattttttgtagagacagggtctcactatgttgcccaggtgatctcaaactagtggcctcaagcaatcctcctgcctcaccctcctaaagcactgggattagaggcatgagccaccgtgcccagcctcttcttgttaataattatcatagttcctgttattgcagttcttaagctgggcacatcatgtaagcccctatgttttggtttcctgcttatggtgtctgcctcatggggttgttttgaaaatcaggtgtgactttatgcaagggctttgcgagcccctggatcctctctgaagggctgggcaggcaaagccacaggctggcagtctgtctgtctgcagcgtggctgtttcctgagagagggcttggctgagggctgggaggcaggtccgccttcctctagccctgatggactggggcacatgcagacgcacttcccagccaggcagacagacccagcacacagatggccacagcggcattcacttggtgattgtcattcacagctcatgccatctggtgccagagacggtcggcgggcacctcaatctcagtttcatccctggactgacactgccccttttaacctgctcttctcatattttgagataagggcacagtaggacagcactgtttctaaatgactttaagaacaattatttaggctaattaaaaacaatgaaacccagaaactgtgagtggtggcattagagccgggagccgggcacctgttgtcatgcaggctgtcctgggggagagcaattagtttgtttggcaaaaccactggaatgttcttggtgggggcggaagttcaagtttggagtgggtggtgggtttgctccttggatgtgttgcctccttcggagcagatggagtcgaaagaattttcagagtggggaggggtggcactggccagggaaggcccacagggctgttttccctgtctgaatggtccattcataaaattgcctcctctttcttctcctgatggcactggccactgcctggtttcccccatctcaggggttcggttctctcaaagctgggggaggaggagctcggtcagctaaaaaggtggtaggagcctccttctccaagtctcatctgttctcctgggctggcatgatggatggcctcgggctgctgggttgtgtgttcagtggcgagccaggatttgccaagggtgtttggctagctcggggactgacacatacggctaactagcgtgggctgtggtgcgctgtcacgcaatgcgtgtcacctgggggcggggagggtgcacgcctgggggaggctgtgacccacctttcatagtggggcttggcaggaccttctccttcaccccagctttgatgcacctataccaggtttgatcagtaaggttggaggaagacaggtgcttctcgagggtccgtttgctcagctgcttcttgctggggacagctgcacctccatatttccttcctgtttctctcgtgtgctcccctctccccactcatttccatttacttctctttcttttccacttctttcttcttcagtctgtctcttattctctctctgtatttttgcgtaattacagacatgacttgttacattcgtgaaaaatcttaagtctgcctggatggtttctgtctagggggcacttgcttgatagaagagaaacaggggcaccttcttctcgcacattcctcactgaccatgcagggacagcctttgagcaaacaagggagagacctctgcagaaggcatttcactcccttgtcagggctgtgcgagaagctggtgacagaactggcccggaatcccagggacacactgtctccccctgctgttagaccacgtctcctcgcaatagggtctgcaccaaacctcctcctgccaacacttccaagaaaatcttcacatccacctatctttaagggttagtttaagctttgagaaatggcacaagagagatttagatgtctaatttcatcctcttgtttagtactttatatttaagtacatgaaaccctaaactgtaaggtatttgtaaaggcagtattggttgaggcatgctctctgctaatcttttctgccttcaggtcactggcttgaagtgtcagtgaccttggaattatttttgcagttgcttttaagccctgtaaagacaccattggaaggttgaggctggcctagaaatggcagctgctgctgctccccgttagcctgaggtcgggtgaggagttcatcacaattactgtttaactttttattttaaaatgattttagacctacagaaaatttgcaaaaatagtgcagagagttcctgtatgctttttacccagctgcacctagcgttaacatcttggataagccatgatacatttatcacaaccaagaaaagaatattggcacactattaataaccacactacagacatttttcagatttcaacagtcttttcattaatgtttcctttttcttttccttttcttttctgcttttttttttgttgttgttgttgagacaaagtttcgctcttgttgctcaggttgcagtgcaatggcatgatcttggctcactgcaacctctgcctcccgggttcagatgattctcctgcctcagcctcctgagtagctgggattacagttgcccatcaccatgcccggctaatttttttgtatttttagtagggatggggtttcaccatgctggcaaggctgatctcgaactcctgacctcaggtgatccacccgcctcggcctcccaaagtgctgggattacaggcgtgagccatcacatctggccttcactaatgtgtttttctatttcaggatgcaatccaggatcccacctggcattcgttgtcatgtctccattagcatcctccagaatatgacagtacctcagtcttttcttgtttttcatgaccttgacatttttgaagagtattggtcacttattttgtagaacacagatggagccaactttttctatctagggccagatagtaaagagttttcgctttgcaggccacatgttctctgttgcaactacccacctttactgttgtggcacagatcagcctcagacaatatgtaaataaatgaacatggctgggtctcggtatgacttcatttatggaaacgggcaaaggttcacatttggtccttgggctgtaatctgccaactcctgttgtgaaagattcctggatttgagtttgcctgatgtgtcctgatgattagattgaggttatgtgtgttggaagaagattcccaaagaggggatgtgcccttctcagagcatcacttaattgcttgcttaaggtggtgttaactgtaaagttaaaagctgctattttttctttgtaattaagaatatttcaggggagctactgtaggattatgcaaatatcctgtttcttttcaaactttcacctgctaattttggcattcatctgtggagcttgcctataatagttatcattgtcatattctaacagtgattttccatttcagtcattccttctccatttattatttggaattcttctgtaaggaagagctgttgttccttcttcctcgcttgtttatttatcaagtatttatgtcagtatggagtcagatatttcttttactttttgggttatgatgatcacaatttttgattgtgtcattgatcacaatttttgattgtgtctaattcttgtgatcaagaattagatgagagcaaaaaatccaaaagtggttgctaagtgttgggctttttttgttctcatcgaattcttgaccaccttcttgatttcatagtcagctttattctaattacaactttgtgggcagccggtgccctaagacctaataggtctgaatttcatgaacttgttaatggcagaaggcagttttattttttggctcaaagcactggtcagatttacaatttcaatctacaacacagctggtgctggttgagttgcagtaagagtgtccgcattagagcgattggagctggtaattggttttcattaattttgtgtgcaagaggagattggtaatgttttctcgtaaatgctaggtcaggtttgcattttgagagtggttccagttattatctctccctatcctcttattccttaagagcttcctttttgttctgttatttgttggggaaggttatttaagagtttaaaaccttgcttcagtgaagagttaaagcgaattgagttttgtaacttttacttgctcatttctagattaaattaaaatgtcagtctaaatgattttgcctcaattggagagccaatcaagacttccaattcaactttcaaaagctatttgacctgttttaaaaaacaaaatgaatatgttgagtcagttttttaaaataggagaaacttctatttctatctacagttgaaattattcttaaggtaactgtatggaagattagtgaaatgattgatgaatgtggcttttatgtttttgtgggttctttagatgatttcagaaacttgtagctctttgctggaagataatggaagaaaaagaaaaatcaagttatatcctgtgactaagaacagagttgtatgcctcactctgaaatatttttaattaactatattttggggcggcgggagatgagtaaattcattcagctcttaaagaaagtcatggaaataatttttctacagtgtcaaggaaaacattgacagacaagaattgtcatttgggatgggcgcagtggctcatgcctgtaatcccagcactttgggaggccgaggcaggtggatcgcctgaggtcaggagttcgagaccagcctggccagcatgatgaaaccctttctctactaaaaatacaaaaattagccgggtgtggtggagcacacctgtagtcccactactcaggaggctgaggcaggagaatcgtttgaacccgggaggcagaggttgcagtgagccaagattgtgccattgcactccagcctgggtgacagagtgagactccatcttaaaaacaaaacaaaacaaaacaaaacaaaacaaaagaaaaagaaaaagaaaacagaaattgtcatttgcccaagatattgttagaacaaaaccaaaccaaaacaacacaaaaaacaacaaccaaaaaataatatggggagtttctgatttgtcttggtacagaattaaaagcctcataaactacagcttaatttccaccctctttaactaaagaagtatgtgctacaaaacactgtagaagttcaggccagtttccactcataatgggaaattgcatgcaaaattcaggcatgctgttcctacttaacttgttcatcttgctccattgcagcactggatgaaaagtgaggattttaatactttaaaaaaatttacaagagaaaatcgtagactttgtcaccatgtgtttatttcactatctgggatgcagcctaaataaagttatgagtcagatgtagacctcttgaagcttgggagcactccgccggccctgccctgccaccacgcacacacaaaatgtgaaggagacaagtaaagagaactgctggtgaaacagctggatgattgcggtggatcctaacatcttgagaagtgaatctgtttgcaaaagctttagcacaaggagagcgatctgcctgaattgcggtagagagtgttgtttgcgcatttgtaaaacgaggcgaatgacccagctgttggccgtaggggcctttgctgtccttcctggggtttgtggtcgctgccgaggatcagcactttcacacgcgaccttacgcattccttgtcatcttgtccttggcgggcctgtcaaaaagaagttattttgaaagcgtatcgctgattgcacattttattccataagtgctcagcgcgtttcatgtaactcctggaggcctctgagataagagtggaaaagtgccctgtgcccttctgagtggtgggtgatctattttcgacttggagactggtgacaaagctgtcttctgtcaggtcagactcgcagggactttcttgttttctgttcctctgttgacagctgtgcctgtgttcagaatggtcatggggtagctggaagatagctctggcatttaaacacctagataggaaggagacgatggaatgtatttttctttgctattttggttagcaagtccctagtagtccatactgagaggggaagaagcagagagacctttgggagggcgggcaggaaaagatgtccaacttcaggtttagaaggcacagagggagttctaccgttggtatatggtataggtatttttaatgcctagaaagggaatggctggaaggaacatgaaaaataaaggttggaattgaggtagccttgggcgggagggtcgggaggtgggttcgggctaacgtgagtaacaagatcagggcaagactttttttttcggtatgctttgtgaaacaaattgaaactaacacactgaaaattgcatttttataatgcttttacataatgcaggatctttgttttaaaagcacagtgacgcaggctgacatgataggagaacttttaagagaccctttaaatcctcacaggtatttaacgtaagcctgagcgtatagctcggatggggatcagtttaaatgctatatgtattcccagcatcttgcatccacattgaatagctgtggagctttgacaagttctttaatctcacggaccttacttttctcatccgcaaaatggagcccagtccattcctgcttcaaagggctcttgtgagggcccaaggtacagcgctacatgacaatgtcgtcatgactctttaaatatcctatgaaacctgtgatagaaacttgggctctcactcccagatcttactttccttactctttattattactatttatttatagtagctagtgactaatgatgaatgattcttccgcttggcccccctatagttaaggtcatggcttccttcaagaatctgatggaagtatgagcctccttcccccgatcccacccccacacaatttagcacagaatgccagtaattcagtctgaagcccagttaaaactctctgattttaatgtgctttttaaaaatggaaattacacatggtagcgcacgcctgtagtcccagctacttgggaggctgagacgggaaggttgcttgagcccaggagttcaaaggctgcagtgagctaggatcccaccactgcatccagcctaggtgatggagccagatgctgtctctaaaaaaaaataataaaatataaatggaaattacaattttatctaagagatatttttacagatgtctggaatttggaaatttctgcttataggcatttctatccatcatttatttttacagtaaaagaaataggccgggtgcagtgactcatgcctgtaatcctagcactttgggaggctgaggcaggcagatcatttgaggtcaggagttcgagaccagcctgaccaacacggtgaaaccccgcctctactaaaaatataaaaattagccgggtgtggtggtgcatgcctgtagtcccagctactcgagaggctgaggcaggagaattgcttgaacccaggaggcggaggttgcagtgagccaagatcatgccactgcactacagcctgggtaacagagcgagactgtctcaaaaagaaaaaaaaaaaaaaagaaaaaatttgtgttccttgtataagcacagtgcttttctagtactgtcccagttcagctgcctatggcaagattgtaaactatgaaaagtaagaatgtaaattaaacacagtgaaaagctgagtcatatggtaatgtctagaaaagtagtaagatactaaaagtatgtaagtcaaagaggcccaaattatattttcctttccatccttaaaatgtcatagctaactagagggttaacattttttaagtgctgagtccaatcaatgtgatttaaatcatccatgatatattcatagctgaatgattaagttggatgatgtgacaaaacacttaacttgtatttatggtcattgatgattttacgcattattagagagaagcatagttacacccaattaaatatagacatctgatccagacatcagttctgtaatttcatgggaaaaagtaaatctaaacgagcaaaaaatgtctgggtattaactccagtctgatggtattacaagttttcccagttaattagtaacacatattatagaacaaatgtttgaaacagaaatctcgtgattttgcgtaacaaaccaggagttgagctggaagtctctgttctcccactgcgttgctgtgtgaccttgggcaagtcacttgaccattgtccacctgtgatacaggggatgtgactacatatctcgaatgagaaaagacttcttcccatgttaacatgttttgactttacatcaattgtgtcattgctgcttttttaaaaatgttgcatcaacatttacgatacatataaaaaaggtacacaaattttaagtgcatagctcattgaatgtttactcttctaaccagctcctagattaagaaataaaacatcaacatcctagaagtcctccttgtccttcctctgggtcatgagtgctactcctaaatggttttgtgtgtgtgtgtgtgtgtgtgtgtgtgtgtgtgtgtgtgtatgtgtgtgtatgtgttttaaaaaggagagagagaaataatgagttgataatttttagaaatttggtggtctaacaaattaaaaatcaaatattattcatttggaatcctaataatccagtccacaattccttatctgcagttttgaaatacaaatagctctgaaaacagagaggtttttcttaaagttttgagcaaaagtatttggcaacaaaatctgacttgataggatgagaggctgtttgcagtctttatttttaatctcacatagtgtgactatttatgcattttactcaagaaatgttcatgtgtttaatgctatggttctggcctggactctactgggttcaaagtctagcacatgcatcatacttgtttgtttttcaaaataaaaaagattctaaatttcaccaaatttggccctaaggatttcggattcataccacaacataattgtttacacgttgatgtcccaacatttttactgcttagatttgtatgatttttatctgaaaagtaaagcagatatagttctagttaactgcttggtgcattatcaaacatccttcttccaatcctgcatttaaaaaaaaagcactgttactttgcaataattttagatttactaaaaaagctacaaatcaagcacatagagtttccctaacttcccctaatgtcaataccttacataaccatggtacatttttcaaaactaaaacattattaatgttggtacaatactattaacaaactatggacattattcagatttcttcagttttcccaccaatgtcctttttctgtttcatgatcctacccaggatccaacatggcatttagttatcatttcttcttagtcttccccagcctataatagcttctctgtctttcctgtttttttttttaatctcctttacagttttgaagaataataggatcttatagaatggcttttaggcatttttttgtttgtttgcatgtattttaaagtttttaaaaattaaactttgtattttgaaataattctacattcacctgctgttgtatgaaataatatagaaggaccctgtgtaccctttattccgtttcccccaatggcaacatcttgaaaaccatcacctgatatcataaccaggatattgacattgatagaatcaagatcagtagatcctccaaccaactcaactcttgcactcccttggttcagcacgtgctgactggggcctcccatgagtcaggctctgctggaggcctggggacacaggggtgagtgagagacaaaacctgccctcatggagcttagcttctaggaaacagacatagcaagtaaacacatgcacaaacagtataatgtcagctaatgagtgctatgaggaaaaatcaatcagactaaggactcagagaaagttggaaatccatgggccagccttccctttcagctctattggccggagctcaggggcaggtgcctgcttttgatgggagaaaatatcagtaacagtttaattggtgttttacagttccatcatgtataactattttatatctttgttggaaatccacacggttgttctgtgctggtagtgcgggtctttaaaaatctagggagtttgtttgttgggaaattccgtggaaagccttgtttccgatgcttctagtcccacagtgtagagtccctcctgttggtgatggcattttgtacatttagtgacaattggcatagagtataaagccttttacaagtctaaagtagcagtgtttctatttcttggtattcttcatatcatcaagaagctgtgacaaaatcagagaggtagaagccagggaagattctggattgcatatatttagatgggcttttcatctgattgtcaatttgtgtcactcataaaagagatatcttaattttaagtgcttccagaaaatgggaatgaaacaatgcttaaatagggccttcagatcaatttatggaatgatatcagttatcttaaaaaccctggaaatgagtgatttaaaataaacaactatggcctttttttattgtggttaaatagatacataacctaactatttttaattgtacaatttgactaggcatggtggcacacacctgtaatcccagcactttgggaagctgaggctggaggattgcttgacgctgggagttttagaccagcctgggcaacacagtgagccctcctgtctactaaaaaaatttaaattagctgggtgtggtggtgtgtgcctgtagttccagctacttgagaggctgaggcaggaggatcgcttaagcctaggaatttgaggttgcagtgagctgtgatagtgccactgcattccaggttgtgcaatagagcaagaccctgtctcaaaaaaaaacaaaaaaacaaaacctgtacaattcactgacattaaataggttcacaaagttgtttaaccacccacactatttccttaactttttcatcacccaaacagaaactctctacccattaaacaaaactccccatgtccctcttcccccagctcctgctaacctctaggctactttctgtctctatgaatttgcctattttaggtatctcatataagtaaaaccatacaatatttgtcctttttgtctggcttatttcatttagcatcgtgttttcaaggatcattcatactgtagcatgtatcaaaattgtattcctttttatggctgaataaaatatactttgtaagtacaatatacgtatatatcacattttagttatccattcatctgttgatggccagaagcatcgttttcaccttttggctattgtgaataatgcttccatgaatgttggtgtacaaatatttgagtccttgctggacttgaaagacctgagtcaatacttttgggcatatacctaggaacagaattgctggatcttatgtgttatggactgaatgtttatgtcccctcaaaattcatatgttgagatactaaccccccatgtgatggtattaggagatgaggtctttgggaggctgtggagccctcttgaatgggattagtatccttatgagaagagacacgaaagagcttgctcttgctcttgctctctacccataccatgtgaggatagtaggagaatacagtcccaagttagaaggagtgctttcaccagacaccagatctgccagtgccctgatcttggacttcccagccttcagaactgtaagaagtaaatgtgcgtgttcaagcaacctggtctatggcaatttgttatagcacctcgaattgactaagaaaatatgataattctgtggttagcttttgaggaactgccaaactgtttcccacagtggctgaaccattttatgttcccaccagcaatgcaagaggattccaatatctctacattctcaaacacacttgttattttgtttgtttttattatggccatcctagtaggtgtgaagtagtatctcattgtagttttgatttgcattgctctaatgaccaatgaggttgagcatcttttcatgtgcttattggacacttgtatatcttctttagagaaatatctgttcaagtcctttacctgtttttgaattgaattttttgttgttgttgaactgtagaatttctttatgtattcagaatataaccctttatcaagcatatgatttgcatatattttcttccactctgtgtgttgtctttttactctcttgatagtgtcctttaatgcatgaaagtttttaatttttatgaacttcaatttatttcttttttcttttattgcctgcgccttttgtgtcatacccaagaagtcattgccaaatccaatgttacgaagcattccccatatgttttcttctaagaattttatcgtgtaaactgtagtttataatctcaagttctggtctttgattcctttttgcatattgtgtaaggatccaacttcattattttgcatgtggatacccagttttcccagcaccatttgttgaaaagactgtgctttccccattgaatggccttggtacacctgttgaaaattgatcatatatgtaaagatttttttttctgggttctctattgtattctactgctctatgtctgtccttatgccagtaccacactcttttgattactgtagctttgtagttagttttgaaatcaggaggtatacatttcccaactttgttcctctttttcaagatttctttggctatttgggatttgtcccttaagattccatgtgaagtttaggataaatttttctatttctgaaaataatgttattgggattttgataggaattacattcaatttgtaggtcacttacaatattaagtctaccaatccatgaacatggaatgtctttccacttattttatcttctttgagtttattcagcaatgctttgtagttttcagtgtagaagcctttcatctccttgctttattcctagtttattctttttgatgctattataaatgaaattgttttcataattttctttatggattgttaattactagtgtgtaaaaatgcaactgattttatgagttgatattgtatcctgcatctttgctatttgtttatgagctataaccattgtgtgtgtgtgtgtaacttgagggttttctacatataaaaccatgtcatttgcaaacagaaatagtttgacttcttccttctcaatttgaatgcttttcatttctttgtcttgcctaattgccctgtttagaacttctagtattatgttgaatagaagtggagaaagcaagcattcttatcttgcttctggtattaggagaaaacttgcagttttttgttttgttttgttttgttttaccattgagtatgatgttagctgtaggtttgttgtatctaacctttatcatgctgaggaagttttttcttccattcctagtttattgagtgttattgtcataaaaaggtgttgaattttgtcaaatgcttttttgacatcgattagatgctcatgaggttttcctttttattttgttaatgtggtatattacattgactaatttttttatattgaactatctttgcattctgtgaatgaatcccacttggtcatagtgtataattctttaaatatgctgctgaatttggtttgcaagtattttgttgaggatttttgcatcatattcataatggatgttgttctatcatttttcttttcttgtactgtttttgtcatgctttggtatcaggattatattagcctcatagaatatgtaggaaatgttttcttctcatcaaatttttggaagagtttgagaaagattggtgttaattcttctttaaatgtttggtagaatttaccagtgaagctatctggtccagggattttctttgttaggaggtttttgattactgattcaatctccttatttgttatcggtcttttcatattttctacttcttcatgggtcagttttggtagattgtatctttctaggcattcgtccatttcaaacgtgaccattctaaactaaactgttggcaaatttgttactactgtctgttttattgaattactttcttgtcttagagtgaaactctcattttaaatgacatgttatttctttccaaggtaaagtaccaaggaacatgaggcttttgcttgtatatatgattgttaatgtgtattcaatttttgccaaatatttaataaaatattttactatatgtcttttgactcattaaaagtgggaaatctcatttgtgtataagattatcaggctatataaaaatgattccaacataccagagacatagtttagattacagggcctctgtggagtttttggtaaaatatcattattgactcacaattatcctcactcttggtaaactgactgcttttatatggtccttagcccatttaatttgtgtagcagaatgaaccagtgttatatttggctcaaatttaaatttctccattttcttatcagacactgggtcagagagagctaagagaagcaaccagcatcagtggggcacaagagctttgtgactttcctgtgtgcttctacctggtcttcaggatgggtgtttcctggtagacagtcattcatgcaacaagcatttgctgccctctaccaagcaccgtcttaaccataggtatcccaaccatgcagaacacagaagcgcacaaagcagacaactccctgtgctttgggagaaccaatgaacccaatgaaccgaatgaaaccaaagccaaaaggcagccttgatcccccaaaagaaattgattctgtaacccaaattgtaaagtttagagctttgtatttttgtcctattaaagaactgaattcattctcaggcactgccatctttgttggggctgggctagctcttatgtcaaaagcttgagcagccacttttaagaggaaggggactacgatgatgcagtcagtaaatttgtgcatggccttggaaaccttccagaattgtaagtgaaagctgatattctctccacagaagaaaatatagcaaaatgggaatctaaccatttcattggaacaggagattggactcaagttactaatacaggaaaaggcaagtagagaagggttgaggtttgaattctgagcagttctgcttgaggtgcagagctgatgatggtttgggttaagatagcaatttccaaaccacagccctcttgctaacagcaaactggattataccataagaaggcaactagttcagttagaacataccttagtattacattttaatcagacaccacaaggagctgactgacgtttaactccagagttgtaacaattttgaattgttgaattcaaaattcaacaattttgaattttgcccaaatttaggaaagaattggagtaagtcaggctagtggcctcctatagcaagtcaggaaagatatactagcagagtatagtgtcatgtctgtggttcaaaggttgtgtccttacctcttgagttacattttgattgacagggcaaaactgaatttttcagatattgtcacttcaaaggattcttaaaactctgccacaggattgatttttgttacgatatcgtcaggcagtgagtgagatgacatcctgaggtgctgaaatccttaagttttctggcccctgctgagtggatgacccaaagacccctgcagtttaactgaggtgtttattcatctgcagactggaagccaaggattggaaatttaacatgaaataaataattaaacctcacttccacaggtgcagagggcataaataatctaactgcatgctgcccaggcattccatagcatgggccatttagatttaatgcccaggcactcacttgtaactgaatatgtcggaaggtggctcctgcctgggatgggaacgggtgctatttcagagcagtgtgtttgtctgtctgctggaaagctgcctccaccctcagactcttctggagaccctttgctgtcttggactccaggggaaatgtgtccgccccttgcccagcccagagtacgaaatctacaaccaactcctcttctggttaaacaaaggaggtgatgtattgaagagaggcccaagagaaatgattcatttcatcagaaatgtttggagaaacagatgagttcgctgatgggagtggacttcacacactttgttctcagagtcatgagtttgaacctgagatcatttgagcattgggaagtggctgaaagtgggtgtcattttctgctttaacagcaaatcttgtgacaggcactgagaggtagcaatccattttctggtgaccaagggtaaggatgcaactactagttctaattatgtctgcatcacttacatggctttgcacacagtacaaatgtaataaaaatttgttaaacgagtcactgaaagaacactgatgcattgtgatattttgttcttcctaatagtggtcttgcctgagccagtgtcactcacagtggaggtccctggaccagcagcatcagcatctacttaggaatgcaaattctcaggccctgttccagagccaatcagtctccttagtgggcccaggaatctgtttttaacaaagcctctggtgattctgatgcctgcggaagcgtgagccacactgggctagagtttctttggccagggaagtgatttaagaattgtacgcatccttatttcctctcctcagtaggaagtcaccatagctggttgcaagagaatcgcattttaaatctttagatgtacatgtccccaaccctactcccccaggacttcttacccaggactcagctagtcccctggcttttttttctctccagatctcatgtttccagattctgtgctcagtcacttcttgggaaatacagatggggttgggagggaggcatcctcccctttgctgattgctggaggggattgagctgtcacgtcagacctctgctgaatgcccactgtgtgcaatgcctgcaccacagtgagcagtgcacagtcctcatccccaggacctcagaaactccaagggtggcagaccttggaagtgatgaaggtggggatgaagtggcactcactgggctggatctaggagcacccagatgggccaagcgcaaccgtgggctggggtggagtaggagggcttcctggaggaagtactgcctgggccatggctgatagggcaagtgagtggcagcagggtaaagagagggagagccaaagggaatttgaggctgaaggagcagcacagcttaaagcacactctggagagggtttcgtccaactctgggggaccttttttgctttttatgttactagatatagtaaagtctgcaactcttacttttacagcttgatgaattctcaaatgtgtgctcatccctgttaccaccacacagaccaaaagactggagatttccagcctcccaaaagggagcccatccacagctccctgccaccaaaggcaacccccattcttacctctgtcatcatagattagttttgttggggacttttttagactatccacttcttaaggaaaaaaacttatcctgtagagccaaagatggctcaggcttgatatgactttgagttatgtgttttgtttggtctatgcagaattttttttttaagctcattgctcagatttaaaagttgggggatttcacacaacaaaagcccaacaacactgggctcgtgaacctcagcagcagtgctgggctgtagtcaggtaggaaccgtccccctgaagatgggtgtccatgcgtcagtatccctggctgttccccactgctcactcctagccagctgcacttttgttacttgcctggcccacttgggcttggcccatgagttttcaatccctgcctttaaatatggttttgtttcttagtttggggcctcctgcatgactgagggtgcttagtaatttccttggttcactcttcagtgtgtattgagcactaactatgagccaggcccatgccaagagctgggatacagaggtgtgcccaggcagagggattgaggtattgtttgttgtttgccatgcaggcagccagaaatgtggcacagtcctacctgcatgagttcacttctcaccacctccttggatgccacccatgctggttgtttcctggcccctgagcccaccttgtttcatgatcatcacacatccactgtcactatcccttcatttcctccctgtctggtcctcatccttccctcaagcttttgctcaagtctcacctcttccaagaagtcttcactgaccagccctttctcttgtgatgcctccctcccctgattttatcagcgtattccccacaccacaatcccatcaattctcaattatttattccctcacattgaagaaacaggggccttgtttctttttttttttcttttttttttttgagactgagtctcactctgtcgcccgggctggagtgcagtggtgcgatgtcggctcactgcaagctccacctcccggcttcacgccattctcctgcctcagcctcccgagtagctgggactacaggcgcccaccaacacgcccggctaatttttttgtatttttagtagagacggggttttactgtgttagccaggatagtctcgatctcctgacctcatgatccgcccacctcggcctcccaaagtgctgggattacaggcgtgagccaccgcgcccggcccttgtttcttatattagttatcacaggccctatgggcaaagacttcccctatacttcccagcattgctccagcatgccctgcacagttctgagcttatggcagatacccaggacacacaggaggtgggctgggaagggcaggggagcaccggaaaaagaggctgtgatggcggcccctggggaggccagaaggagagcaccaggagttgccctcgctggcaggagcctggcaggaaccctgcctgtccttgagggcccatcttccttgcaagagtgttgacaccctgtgaggagggtgcagaaactccagccacagggccacagacgttctggacagtgtcatgtgaggtggcattggagcttctcctcttacagcctgacagagtgtcccttggggtggcaggttcattgaagacagcgtggaactggatacagaaggtgtcattttgatggccattccttcagctttatgccatgctccatagacagcctagggtacccctctctgtcccacttttagttcctcagtgatacagattgctaaaggcaactcaattgcaaatagccccgcaccatgtgacactgcctccttgaaaagtacttcagatgctggcagaggatggtgacctttcagtggtatatgcctgctctcagcccagccagacagaccactgccacagaggtgggagaggcaagaagagcctttaacttaagggcacttggcaaagggctgtctcatttgctagggttctgttatatgtcacttggtgtgcaagcttccaagaactacttggcttcctgacagggaacatgatagaatgtcaggacctaagctaatgtaaaatatgctttggccagccaagtcatgcacaggcaatgcaagaagccattggtcgttcacacgtctgcgccatgttagacgggggctccactgatggacttaacctttccagacccacgtgatgatggagatccggcaggcagtggcttcttactcaaggcatgctgattttgaaaagtatgagggcatctttaaaaaaaaaaagtgcattctttttttttttttttttcctgagacggagtcttactcttgctctgtctcccaggctggagtgcagtggtgcaatctcggctcactgcaatgtttgcctcctcctgggttcaagtgattctcatgcctgagtctcccaaatagctgagattacaggcgctgaccaccacgcctggctaatttttgtatttttagtagagatggggtttcaccatgttggtcaagctagttttgaactcctgacctcagatgatctgcctacctcagccacaaaaagtgctgagattacaggtgtgagccactgcacacagccgtttaaaaaaacaaaacaacaacaaaaaacaaaaaaaaccaaacctgcattcttaaagggtacttgtttcctgtcgctcttttttcctttatacggtggtccccccttatccatggaggatatgttccaagaccctcagtggatacctgaaactgcaaatagtactgaaccctatatatatatactatgtttttttcctatacataacatgcctatgataaggtttaatttataaattaggcacagtactcttgtgcgttggggccattatgaagcgaaataaggatgtcttgatcacacgcactgccgtatcatcaccgtttatcctatcattgaggtggctactaaatgacttgcgggtgggaagtatagacagcatgtatatgctggacaaaaaggtgattcacgtcccgggtggacagagcaggatggcccaagacttcatcagactactcagatcagtgtgtaatttaaaacttacgaattatttatttctggaattttccatgtaatatttttggaccacgcttgactgtgggtaactgaaagtttggaaagcgaaactgtgggtaaggggggactactgtattcccctcttcctgtttttcacctctcccatgcctccccctagtccctcccatttctgtgtctttgtgtttatctgttgagcctttggcatgaacaccagacaaggttggctgggtttataggtgctacattttttcacttgggcgcttcagatttagataataggatacagagacctagaggtttcatccaagtttcagccttgggccagttagggagtgtggaattggcaaccttttatgactgttaagcaaaatctttgcagaggagctgtaccaattaagaaatccttggctgccaacaggaaccccaacagtggcttaaaccagagggacatttctcatctcaacatgaaacctggaggcagaggcctaggtttggtttggtggctcaacagggtctttagggacccaaagtctttccatcccctaccttgccacgttccatgatgtttttgttcttatgcctatggcctcctcttcacaggacagtgacagaggccccaggattacctacttacatgccagcaaccaaagcaggaaatgggatgggcaacaaataaaaaccctctttgggccaggcacggtggctcacccctgtcatcctagcactttgggaggctgaggcgggcggatcacctgaggtcaggagttcaagaccagtctggccaacatggtgaaagcctgtctctactaaaataaaaaaattagccagccatgatagcgggtgcctgtaatcccagctacttgggaggctgagacgggagaatcgcttgaacccgggagatggaggttgcagtgagccgagttcatgccactgcattccagcctgggtggctgagaaagactccgtctcaaaaaaacaaaacaaagcaaacaaacaaacaaaaacctctctttgcttctgccttatctgggaggggaaattttcagactcattgcaaaggaaatgtcatttaaatgtgaaaactgatgcacagagctgagtcattttgggatacctgtgtgagccgggggttccattttcctggtgacccttctcaactccgttcccagtggttctttctcaaaattacagattgtgaagaatttttttttttcctcctagtttcttccagcctggagttcacagtggggcttacttctcacctggtcagccaaagcttaactgaaaatctccaagagttcctgtctttagaaacccataaagtccggtcctactccctggtactgattctcctttttttctgaatggtactcgcatcagcctggaccacggggaacatgctgttcccatcatttaccccgtgtatgagccggagatttcactgttagtgttaagttacagtgccttgctggttgggagcttgccttttgaaaagttcaggtccagccctcctttgccttatcttgggaaatgactttctgctaaaataatttcggtttgtacatatgcatgtccatgcacacaccccagctccacaccatccagtgggaaagggagtcagggatttcatggtagctgtcattttgatgaatgtccctgtgtccacccacagaggccgtgacattcctgcctttcccacttgataatctgaaaatctcccaagcctgattgccttgctataggcctgcaacctggaatgctgcataggttctgagtttcaatccccagggtccgcactggccaggatctgtaagagcctgtgggcttgatgctgataaggcagagagctaacgggggattatcagagagggagagtgccagacaaggtgcattcctctggggatagagcagcaggactttgggagctgggacaattgtgtgaagcaggacgtgattgcgtggtcttgtttcagccagcctcagctatccccttttatctgcccccagaggcactgtgctttttaggcctcctcaccttccctctgaaatgtgctccccaatgtgcccacctcttctttctgttttccagcctctgctgggcaaaagtgggaagttgctctcaagtgttaaacgtgttcactctcaccaagtggaagattttacattagaattcaatcattctgtttacttcctttaaagtcgagagcgtatcagctgagtgtggtggctcacacctgtaatcccaacattttgctaggcctaggtgggaggatcacctgagggcaggagttcaaaagtgagacccccccatctctaccaaacaaacaaacaaacaaacaaatttgctgagtgagatggtacacacctgtagtcccagctagtctggaggctgaggcaggaagattacttgagcccaggagtttggggctgtaatgggctcggatggcgaccgtgcactgcagcccggggcgacacaatgaggccctgtctctaaaaaatacataaatgaagttgaaagcatgtgaagtttatgattggctttgtgatcggaaggatgtgtcatgctttcccctgggtgttgggaaccttctgaaagaactgctgtcggaattcagggtcttctgtgcctgtccacccactagccctcatgggcgtaatgcagagatctcagaagggagagctctggatccagactgcttatgttggaatcatcttccacccacttactcactgtgtgccctttggacagttatttaaccactctgcacctcagtttcttcatctgtaaaatggaaattatggtacataccacatatgattgttagaaggagtcaatgagttaacctttaagtacttaaaatggtatctggcaattagtgagcaccatgtaagtgtttgcttaataaatattaagagtttggggtttggggtgggttttttttcttgtttttttttttgtttttttttttggttggcttaatacctttctaactgaaatttttgttgagataattgtagattcagatgcacttgtaggaaataatttaggccaggtatggtggctcatgcctgcaataaagcctcactttgggaggccaaggcgggtggatcacctgaggtcaggagttcgagaccagcctggtcaacatggtgaaacaccatctctactaaaaatacaaaaaatgagccaggcatggtggcaggcacctgtaattccagctactcgggaggctgaggcaggacaatcgcttgaccccaggaggcggaggttgcagtgagctcagattgcgccattgcactctagcctggacaacaacggtgaaactctgtctcaaaaaaaaaaaagaaagaaagaaagaaagaatttagaatgtatcagttaaaaataaaactaaaaaaggaaataatgatgagatttcccatgtaccatttatccagttcccccagtgataacagtttgcaaaactgtagaagagtatcacagccaggatattaacattgttacaatctacctctcttatttatcttataaaagatttcccattttacttctactcctttgtatgtgtgtatatatttagccctatacaattttatcacacatgtaggttcatgtttccagcactacagtcgagatactaaatagttccatcacaaggatctcttgctttgccttttacaaccacatccacctcccgccctttgacgaaacacctggcagggactaatctgttctccatttctaaaattttgtcgtttttaaaatgttatataaatgaaatcaggccaggcatggtggctcatgcctataatcccagcattttgggaggccacggtgggtggatcacttgaggccaggagttcgagaccagcctggccaatatggcgaaacaccatctctcctaaaaatacaaaaattagccagttgtggtggtgtgcacctgtagtcccagctcctcaggaggctgaggcaggagaatcacttgaaccagcaaagtggaggttgcagtaagctgagatcacactaccacactccagcctgggcaacaaagcaagactctgtctcaaaaaataaaataaaataaaagcaataatacagtgtgtaaccttttgggacaagcctttccactcagcataatttcctggagatttatctaagtttttgagtgtatcaatggtgcattatttttccttgctgaatagtattccagggtatatatgtaccacagtttgtttaaccattcacctattgaaggatatctggcatctttccagtttttggctattacaaagaaagctgctatgaacatttgtgtacaggtttttgtgtgaacataagttttcatttctctgggaaaaatgcctaaaatgcctaagagtgcaattgctgggttatatggtaattacatgtttaggtttactactttaataattataaaaaacactttgttatttaaatttgtacctcccaacagtaaatggatgttccactttttgacttgcagctaacattgtattagtatttgttaaataaattaaaacagaccactggcttttacaatgtatccaggactgtgtaagaggaaagggagaggaggggattcagatggtttggtgacagttcttgtctttaagacatgtgtcatcttagctctgggaattgagtggctggaaagaagagccattagactgtgtgcaggcaaattatagaaggcctgaaacagcccagaggacagccatgtgggaggtgggagatgaggacagagtggaggtttggagaagccttgtcaatgttggtgccaccgatggctgagtttggaaattttatggtcttttgtatttgacaaaaaattggaaatatttgaatttgaagaaaagccattgatttttcatggaatattatatgtttttggttaaaggtaaggattattgcagtgataaatccctttgaaagggtatacttttcttacaagaagaaaacagaagcatggccttgctggaaaatggctggttttagtgactcaccattgtgaacaaaaagttcgattgttggccaagtcacagagtggttttcccggcctccagcacgatgctggttctttctgtggattgggtcattttgatggagtgcagtgaaagttcacataatgtgtttgacgcctggaacagataatttttcacattactgtcctctatatgacaacattattttcaataaaaaccatgcagtcagcaataattttcttgatttttttcttcagtttgtaaacaatgaatgattgaagaagaatggatataagttttaaatatactactcagatccaataaaatatttcacatctgaattagcatctgatttttcatttttataatcactgtgctatcactgtttataccaaatctgttttaaccagtgaatcgataatactgcagggattggagatacaaactgtgttggaaatggaattgaaaatgaattgattctaaactagtatgaatttattttctaaatctgtgtgtgtaggtgagtctggatttgcatgagcaactacaaatccaagagttctccaaataaatttcatgtaaataccatgcttatgaaagcgtaagtaatacacatatgctaatttgaaacttacatatatattaatctcaacagtggttgcaataattgtttggaacctaaaccaacaaaacaattgtttttgtgaaggagtagcttctcattgacattgtttagactactgacgcttggccggatgcagtggctcatgcttctaatcccagcactttgggaggccaaggtgggtggatcacttgaggtcaggagtttgagaccatcctggccaacatggtgaaacccccatctctactaaaaatacaaaaattggccgggtgtgatggcagagtcttgtaatcccagctacttgggaggctgaggtgggagaatcgcttgacctgggaggtggcgtttgcagtgagccagaatcacaccactgtactccagcctgggtgacagagtgagactccatctcaaaaaaaaaaagaaaaaataaaagaactgctgatgcagatgacttttagtagttttattcctgttgtaaaaatctctagagacaacatcctaccttattgcctgcactggggtagcagtttggttgtgtagctgtgtgactttgagcaagttgccttcatagctatagtcatcttccttatctgcaaaatggtaaagctttctgtgggttaataatatgatccacacaaagtgtctggagtggcattggcatacaataggttcttaagaaatgtgagttgtcttcacttctccacctggaatgggcaatatctgtgtgtctctgggacagccctggaccttgaggttggagctcagcgtgaccagtcacagagctgcctcccttttcattctctttctgatatccgccaggaaatgcaacggttctgtttaagcagcattcattgagtgactacattgaactccaaaggaagcttgaataaattctagagtttctttgctgtgtccatgcaagcttggatgggagagctattctggtctctcttgggatgaaagggtgggaaatttcaggacggagtggtgggctgtctgtctggagggtgaacctcaaaaccaatggcgattctccttggcttgagggtaaagaggctctgcagctgtttctcctaatcaaagagggttggttgtagtcaggccatttacaaatcactttccttttctttctctgtcttggtcttgcctcctcctcatactgataattgccaaagaatgtggtccaggcctttttgtggcttttgtgagccttttatagcagtaagaaggaattctcggtattctcatcgtgtataaaagatcaagctattcttatgcatgacatagctcatgttgaacgtggaaaaacgcttaaatgacccagggaggctctaggatggctactttacatagcaattgtgtgctgtaaaatgaacctgttgcattttaaaggggctaaagagaattcttaattttgtacagtttaatctgccaagtgataaggctttcttttccctttttaaaggaaaatctatttagtgatggctatagggaatattgggaaggaagctcatatttttaatttaaacaattagaagtgtattagaaaatctatcctagaaaaacatctcatgttgtaaataagctcagatgtagattgttggatataaaatggagcttaagattttatttttgctaacctgatattccagagtgtatattgtatttttacaatattggctgcatagccaattcatttcaactggaaaatacatcaaaaagcatataagttaatcaagatcaagctaaaatacactttaaaaaaatgttttttctggttttattgcctgccattctgctgatttatttcctagagaaagttaaacatttttaaaacacagaatgaatggttttaaaaggcaaagagcatagatctgaagccttaaaaatattactcagctataaaaaggagtgaaatcctgccatttgcaataacatgaatgaaactggaagacattatttgtgttaagtgaaataaggtaggcacagaaagacaaattttgcatgttttcactcatatgtgggagctaaaaattaaaacaactgaactcatagagagtaaaatgatggttaccagaggctgggaagagagggtagaaagtggggatggttaatgggtacaaaatatagtaagatagaatgaataagacccagtattggatagtgccgcgggatgacgatagtcaacaataacttattgtacatttaaaaataaccagaagagtggaattgtaatgttcctaacacaaataaatgacaaatgcatgagttacctgatatgattattatatgttgtacctctgtgtcaagacaccacatgtactccacaaagaggtacacctattatgtacctataacaataaaaaattaaagaaaacatatgaagtaaacactcggttataaaaaggttggatgaatgagcattggcagggctagcttcactggcaggtgatctgtgctgtcacatagggccccatgcttaaaggggctctgtgcttgggcgtgatgctctggtaatcaccattttgaaattcttactaatttctgaacaagggccccacattttcattttgcagtgtgccctgcaaattatgagctggtcctatatatcagctacccaataattcagctcaaactagctttggacttttgaattttaatcctaatcttaactaacgtttatcagattgtttttttctgtatgtgaatttgtgaggaccagcgtgatgaactttcatgtagataatttttttcaactattttcaaagggctaagtattagataagtggtgtttttaaacatttttatcttgtttcatacagtataaagctaaatcccacttatttactagtttctggtaaaatacgtaggttctatatatttttgctagataaaaacaggtgaaataaaaccttatttctcaaattattaataaagtattaatagtggctattgctgaaagctgggatttcaaatgattttcactttctaagttttatagctctgagttcaagtttttacaacaaggcggaattatttttgtatttcaggggaaacaagaaacaataaagaattttttgaaagtctgttcattgtttcccattctggaaggtggtgttggggcattgaggatcctggggttcctattcctgagggcaaccacagaaaatttagtgaagttcaagaaatggcttggaatgattgagagtgtggctggggtggcaggactgtggcagaaacgtccagtggggtttgtaaacttaggaataatctgggcctggcgtccaatttcacgaggcagtgatgcaattttattttattttgagtccttggctatcaattgtagtgtgtctttgtttctcatttctttttctttttaaatgttctcctcacctcatccctcaatagcaggtcagacgtgttgctgtgagccaaagctgcatgttgcctttgaaccaggacagagctatcctgatgcagggtcaggttcaatgtgagacaaacagctttggattctaaacccttgttgacatctcagccccgctgtacaatgtggcatggctaatgccctcctgctgcttgtgaaatggccaggatttaaatgctgggatcgggagtcaaagacccaggggatgaccctggcattttgatgctggacgcttgcctaggagagggcaaccccgcaggcatgctgggaacactggagcagacagcaggccattctgggagcagcccacactggccagcattgctgcctgtctgttagagggagtgtctgccctgaccctgggaggagggaccatctcttacttttctgtctgtaggcagaaatgttttcactaaaggccctggcacatcttaaacatgattttaaagatcagtgataatttcttttttttttttttttttaattgggatgggatcttgctttgttgcccaggctggagtgcagtgttatgatcgtagctcactgcagccttgaactcctgagctcaggtgatcctcccttctcagccttctgagtagctgagactacaggcgtgtgccaccatgcctggctattttgtttttttaattttgtagagatggggggtctcattttgttgccaggcgggtctcaaactcctggactcaagcaattctcccaccttggcctcccaaagttgggattacaggcatgagcagtggtgcccagcctcaattatgatttcaaaaatcataaagttcaactaaaaaagtcagaacccattagagatgaacagaatgtttgtttttttaaaacctttgtcccttggagccccagggactccaagacatgtgccctcctacacgtcctccagaccagctttgctcacatcagcgttctgttttaggctttcacctagtatttcatatgaagaaagagttcatgtctaaaaagcagtaccactgaattcgatcaacttttttttatcatgctatttgatccttagtgtccaaggtccctttagtgctgacgagtgaaaacagataccaatagttggactatgatcatattgggcagtttcctttgtatttgaggtgggttttcgcgcaacaagctggtggtcatgctgaactggatattccgcaataatctggaaatgtagccaagactgcaaattatgatgacaataatcagacacttctgtagcatatactgtgtgctcgcacttgcctgagcacttcccatgtgattgctatttaatcctctcaacagccaggaggtaggccctgctgccagccccatctcatggtgcctccggttctcaggttggagaacaactgaatattggggctgccccactgggcctcctcagagagccacttttccatcttcagttctctgcctcccagttaaactcccagccccagtaggaaggactgaggcgggagaaggagctcacagtttggagaatgcagttttcttggagagaagctggtccttccctcccccttcccctttgggggcaaatgatggggcttcctttttccaaagttttctgtgcagatagggcaccctggcatccagttttccagctagacacgtgcgtcatcaggaacagctgcctgccctgggctcctggcacaggagaaggagaagtgaggtcaggaacccttatcccaaagacaggcttcatgtgagtcccaggctctggacttgtggagccgggcaggtgacgtgaaggccacagttggctgggactgcttttgcttggggaaccagaaggctcctacatgtggaggttgtcatgagacacacccctagaagggaatccggatttctccagggtcatctagaggagtggtttgggaggaggctcttgttactgtcccccagcccaagaccatggaggacttgtggggtgcgtgtgtgattagactccagccgggcgattgtggccacccctatccagtggtgcaggaaagaggccaggaaaaccagcctggctaacatggtgaaatcccgtctctactaaaaatacaaaaattagctgggcgtggtggtgggcacctgtaatcccagctgctcgggaggctgagataggagaattgcttgaacctgggaggcggaggctgcagtgagctgagactgtgccacttcactccagcctgggagacagagtgagactccatctcaaaaaaaaaaaaaaaaaaaaaaaaaaaagagtccaggagaggggaggtgtgggaaggacaggccactgccacctttaccccaagctaccaccactgcaatagctcttgcctggctgggaggaggggacaaaaagaatgtggaatcagctatgagactgaagttttgaaatgaactgagctgagtcttagaaatctaaatgagactggataattgcaagtgactgaaaagtcaacggatgactttaaggaagtccccactaatggggaaagtcagagaaggggttgacattgcccagatggggtagttatgtaaaaaacgaaggcattctatgtttgtactctgtgaactgagactgccgcataagccagcctcctttatctatcagtctgatccagaagaattattgatttattcatgcatttatcccacaatgcttagtatcatctgcgtacaatgctaggtactaggaaaacaggacttcagggttttgcaaatgtgctctcttcctacccactaggattctgaattcctacacagggattgtatcctttttttttctctgtccctcacctctgtttattgttgttactcatttaatattgtaaggtaatgtgttgttgatctacagtgggaaagtgctagcattgtttcagattcaggaagcttattcacattagtaatggtaatttcttattagaatcagtaatagtaagaagtgataagatccaagtatggaagtagcattttattttcttttttctccaattgaattatcatatattttaattaagatcatgttttatattattttgtgtcattcttcagtaggaaatgatgcatcagaccaaacaaggtgctcagttacagttagttaattgtgagttcatgtatggttttcaggtaagtcatatgccagctctggccctcatttttgtcatccctaagatattgtgtatgtttgattgtgtggttgtgtatagcagtagcaataatagtggtggtatcagtagtaatcattgtgaacagagatgattcttttaaaattaaaagctactgcaatttaatagctactgccatagtctgagcatgacatgaggaggttggctagaatatttcaatctttattgattgaggccaataaaaactgatctagaggctgggtgcggtggctcacccctgtaatcccagcattttgggaggccaaggcgggtggatcacttgaggtcaggagtttgagaccagcctggccaaaatggtgaaaccccatctctaccaaaaatacaaaaattagcagggcgtggcagtgcctgcctttaatcccagctactcgggaggctgaggcaggagaatcgcttgaacctgggaagcagagattgcagtgagctgagatcgcaccactgcactccagcctgggtgtcagaacaagattctgtgccctgcccccaaaaaactgatctagagaccccaataattacctttcagttatgtcatgagtgtgtacttaatcacctggactccactatataatctgtttggcataaactgtttttgctcttttctgtgattccccaacacatctattacaccctctgtagagtatcttaaaatggttgccgtcatcctgggtcacccctaactttggcgtccatatttgtaaagtgtcttttccttcctctttgactgcctcagtttcccccagaatacctcttgtgatgcttcttttgttctgtccactccctcagtgcttgctctattctccctgctctttagggcttttagtgtgagaatcacagaagataagtcattgacatacatacaggcttgactaacggggcagatgcagagaagtggatttttatggaaaatatatggaaagaaacctggccaaagagccatcactaggattccaggtctggcgtggccacagatctgctgtgtggtcctaaacaagtctgctacacagagtaacgtgcactaggcttagctagtattataactgttgctggttattagataatctttcctggcctcagtttccttgctgttaagtaaggaacatggcttgagtgatatcctgagtcctctccactctcattttaggtgcaatacgattataaccctgactaggataaatcactagggaacaaagatgaggccctaaatctcctgtgtcccttatgacactttgcacgctacaggggcagagtagtcatttaataattcagtactgcaactgggtttttagggcattgctgaggaattttttattatctaaatatatgcattactggcaaattaaagaataaatggacaaattctactcagcatttgtacagtgttttgaaagagactcacattcatcaatttaatgtcagcctcgcaaccattccctaaagtaggtagagcacatctgacctcaatttatggataaagaaatggaagcttagagaggggattatttttttcaggtttcccagctagtaagtggcaagtctggaaccacaatcccgggctccttatccctgtgccagtgcgttttccagcctactaaggactacgtttttgggctagttgggaacagtaagaaatacttcattgtgaagactgataatattcagatgtattaatccctagaagatacatggcccaaaggatcatcacccaggaatgttattagaatgaagcttacccatctcctgtgaggacctggctaagcagatctgtgcctggagttacagtcatggcagtgctcctgattctgaagatgggctatgggaagaggactttgggacatgctaagcctcctgagtagacacttgagccttggcatagttgggattagggaatggtaggagaccctcttaagaaagaaaagagtgttccctgactcaagagcctcatgaacctgggtcttgcccatgctgggtagctagaaatgtaaccatatctgcagttcttggaggtcaatgaaaaggttgtgtaaaggagtattgtttggcagatgtctctagtaccattgctgcaacaaataaagctggcttagcactggcctgtctgaagctgtgctctgcagtggttgtagtcatactgagctgaccacctgaccatctaggctcctaggaactgctagaagggccagacaatgaggacccaagagcttccaacccaaggtactcctagaagatcccattacttgacagcagcaacttctgcttctagaacttgctgagagacctgctgatgagagcagctgctgtcagctgtcaggaggagctgctgccccaagagagcaggaacagcctctgggagctgtgggtggcccatgcccaacaggagtcaccagtaggagcagcagatagagtaccaggtgaggcagtccttcctggttgtcctcagccccttagaattgttgagaaggggcaacatggtccatcttccaagaagaatccttccctagtagttgacctggttggagacccagcagctcagggtggaggctccagctggcttgaattgtctcctggtcttcaagtcacttgttggaggggtggcccagggaaaaaggattgccttcccaaatgatgttgatgaaaataatatctgtaatccaaaaggtttttaaaatgtaatttattgcctgggagcattggttcaagcctgtaatcccagcactttgggaggtcgaggcaggcagatcacgtgaggtcaggagttcgagaccatcctggtcaacatggtgaaaccccaactctactaaaaatacaaaaattagctgggcatgatggcagactcctgtaatcccagctacttgggaggctgaattgggagaatcgcttgaaccagggaggcagaggctgcagtgagtcaagatcgcaccactgcactccagcctgtgcgacacagtgagactctgtccaaaaacaaaaacaaacaaacaaaacaaacaaagaaaaaacccataatttgtgaatattcgtacttctatactccatcactctttactgactaactcccaagtggaagtgaatgtttccatcttgtgtcatcacactgtctgcagcactttcatatcagccatgcatgtactccttcatcagatgttggttgagtactgtagatggctcaggccatcaaatgtcagttttcctttgctgcattgtacttatgtacatatcttagccctccactagactaaagtcttttttgttaagtcctgataggttaggtttatgctgtagccacaaaaccccagaggtttaatacaacaaaaattttatttctcactcattcacaaatcctacatgatttggttgggtgaatattgaggggctgctccatatgattcctcagggactcaggatgactggggttccaccatcttatagctgagctaactggaacatgtggccttgatcactgagatggggaagagagagtactgaagggtctcacccctgcaattacattgcaattacaattacagtactgaagggtctcaccccagcctggagatagcatcacgtctactcacagcccattggccataactaatcacatggtccccacttaactacaagggaggcagaaagcgtaatccccctgtgtgcccagaagaaaagaactagatgagcatgagcactagaagtctctccacaagcttttgattatgttcttggttccctcactcacttgcagcaaagttgtctcaggaagtatcacattcttcatttgtaaaaaggggataatgtaagtgatgaaaagtcaagtatgtattgccaattttccagtttggaaaagactaatcaataatttaggcatcctctgtgtgaaggtcttggtcttttctctttcctagtaatgaggaggtagaatggtaggtgcgtaattaggggcagaagcagtccccttagaaggccccagatgtctccctccagggcaaggcttagcctcatttcctgccatagaacaactcctgcaactgcataccaccctcaccccagagcctcagggcacctggcttctcctgctctgtaggcctatatggaggcccattgaccaggtctcaattatgtaacatctggcctaattaaacgtgtactgtttacctttattcatgcaattgccattgaaagagtaggatttgggattggggtgatctgggtgatctaatattgcaagttattatgtcctaacttggagtcagtgtacaagaaacaatgatcagagttcagaagacagtgggtatttcagtatgcatattcatggggaataaatgactggagtatagagtaaaagaattatggctgggcgtggtggctgatgcctgtaatcccagcactttgggagaccgaggtgggcagatcctgaggtcaggagatcaagatcatcctggctaacaaggtgaaaccctgtctctactaaaaatacaaaaaaaaaattagccaggtgtggtggtgggcgcctgtagtcccagctacttgagaggctgaggcagaagaatggcgggaacctgggaggtggagcttgcagtgagccgagatcgtgcccctgcactcccgcctcagtgacacaactccgtctcaaaaaaaaaaagaaaaaaaaaaaagatttaaaacatggaaaatttgaatttacaactgtgcttgttatccttcctgtaattgtgttttaaacatcggttgattgagtttttttcattgtttgtttggtttttgcataaagaaatgtttgatatcacatttgtcttgtccgtgtttcttgtgacaggccccagcactagtgtggcaatcctcaactgcaggcttctgaggacagaactgtgtgctgcctgcttcactctctctccaagctccttttgcaatgcaaaataaggtgtttaataaatgatgaggctggtgaaggtggtctgcagtgacagccttcatatttaattcactacaccctcattctttcctattctttagaagtactgttgggaccttcaaatctcataaatattctactgccctcctccccctcctcctccctcctctccagaaaaattccatctgtgcaaatcccattttgttccaagggtgataatcttcagggaaacttatggaatgtgatgggtttactggagttcctgggtgacaggcccccaagaacccccttcagttctgcagagcttactgtagagatgacatcaatgtcccctggccatctggaatgaactgagtgtgaggtggagagagtgtgggctttgaagtgtctcccacctgatttgaatcccacccctgccgttgactggttgtgcgacattgggtctcagttcagatcttgttcacttgtgttctgtagtggatcctggcatctgttgctccatctgcctgccacagtttcccatccctcttcctctggttttgattccttgaggggaattcctcatccacctcacatggtcctactgtggctatcagtcatggaatcacaaagggatcttcctcactcactggagtgggcaggtgacccaaagcgctccattgcactggccccactcactgtgcgagggaggagcctcattctcaagcaaccccagttagcatttctcctgggactagtgcatggagagaaacaatcccttttgcacatgggctgcctagaaagaatgtgagtctggggcttcgggcatctgttctgtttgacatgtggcaatatcctttgagaatgaagaaaaacagacaagcagcctgagagctagggcgggggacagaggcttggccacatggcttccacccttgcatgcagtgggcctggagtcagcaccacccctgacttcccaaggacagaagccagcacttcccctttttgtttcagcaactttgggttgggtttctgtcacatgcacttaaaagagtttgaatacaaatacctttatcatcctctagtttttaaaacacattacattttataagcaatatataaattcataattacagacattcaggcatcttagtttttccttagaagaccaagtactcagaggagggctccatgcttccccacctctgcccaactggactctcccttgcaaaacatgtgtcaccactgacagctgtttggggtataaacttctagccctttttctggtatttctatctgtatgtttgtatacatgcatagatagtttgttttattttttagcatatactgtaggttattacatgtattcttctataacttttttagttttttttttttgagatctttgatgttaatacatataattctactccattctttttttttttttcttttttttttttttagtctcactctgttgcccaggctggaatgtagtggtgtgatctctactcactacaacatccgcctccgaggttcaagctattcttctgcctcagcttcccaagtagctgggattacaggcacccgccacaatgcccggctaatttttgaatttttttttagtagagacagggtttcaccatgttggccaggctggtcttgacctcctgacttcaagttatccacccatctcggcctcccaaagtgttgggattacaggcataagccaccatacccagcctaattctacttcttttttattaaagacttcacagatttgatagcatagttaatctgcttaaataatacgctgttgatggacattgagttattattgtcctgtctttttctgtagagggaaagtttgtgtttgttttcctacatacatttggagacatatctgtaggtagagtcttctaatagaatggctgagttgcagagcatgtatgtgacacattttggtagattctgccaaatggtgttccaaaaaggcttttcggattcagactcccacctgcagagcaggaaatatttgttttcccacatcctcaccaacaccgaaggtgagcctgtttcagttttcctagtcttgaaaatgaaaacacatgagattgttgttgctgttcattcctctgaacactggcagagtgggcacccttcacagaggtcttggtctcttgcatttccccttccattaattgatactcattgatttcactttctaaacatgtgattgtgtgtccttcttattgacttgacaaattcctaattcctaacaggtctcactgccatgctattgatgttgtaaatattgcttttggttttgtttataaatgggttttattttgtttttgtttttgtctcgcgggtatatgtatgtatagttttaggttttgtttttgtttttctttaatcaggccaacattttcaatttttatgactttgaacctgttcatctttttctttatggcttctgagttttgtgtctttcttgggaagacctttcccatcccagattacaaagagtttctcctatgtgtattttttattaaagttagagatttcatccagtattgtcatctttgtcttagtttcttcatctgtaaacaaggattgtaatatgtgcctcttaaggattcaatgagataatgtgtgtaaagcattcctcctccttctcccacctctgtcttattctgtttgggctgtcttattgggtagcttaaataaacatttatttttaacggctctggaggctggggcatccaagatcaaggcaccagcaaatttgatgtctggtgagggacagcttcctggttcttggagacgccttcttgctgtaccctcctatggcaagaggggtgaaggagcgccctggcggtgatcttttttataagggcactaatcccagttatgagggctctgtcctagtgacctaatcacctcctaaagccctcaactcctgataccatcacaatgcaggtgagatgccaacatatgggttttgggagaactccaatgttcagtccaccctcccacctttccagtcactgcactgacaagcttgcttcattcctagtggagtcctcagggctgtttctttgatgccaaggaggttggcacaatgtctgggaatcctgtgtccacccggccaccagcaggggactagctgcttcctgggagtgctcaggccctcacaccacctttgctctcctggaaagtgacattcttctatctactttctagtccacattttgcagtgcaaccgcgggactggaacatagccatgggccagaagtcttggcatcatcctggactctcatctttcttttctccccacatccagtccatcagcagatcctctcagctctaccttaagacacagtcagaatcacttctccacccctcctctgctaccacctgggccaggccacatggcctcccacttggatccctgcagtgcctgtcccaccctgcccctgcagcctgatctcctaaccctcatccttgcagtgtccatcccaccctgcccctgcagcctgctctcctaaccctcatccctgtggtgcccatcccaccctgcccctacagcctgctctcccacagcagctggagtgaccgttgaaaatgcacatccagtcatttccctcctctactcaaaaccctccagacccttcccacattatcagaataaaagccagaggtcccactatggcctggcaggccctccatggccttcaccttcgtttcctctcacttcatttcccgtgctctccctgacatttctctcactggctaccttgctcttcctcaggtatgaccttcgctccctgctgcctggaaccctctccttctggattctacaggactggcttccttatttcctgcaggcacctgctcagttgccgccacatggagaggccttccctggccctatctcaagcaccccgtaatcccttttcactctctgtccccctttccttcctcagtcttcctcagcactaagcattgcctgacacattatacatttacttgtcctctactggaatgtcatttccatgaggagagagactttttcttgttccctgctgagtcaatctccatccctagagcaatgcctgccatatggcagcccctcacctgtttgttaaatgaatatgaaaatgtcgaacctggactctttctaatgagggcccagcctgcttttagaaccttggctaccttccctccagtgggcctcggagtgggcagtgtgaacatttgctcttgtgaatgccgtttcccatgggccttggtaagttctgccatggagggacgggactggtgagtgtgcgcatgtctgtccatgtttgggtctgtccaggcatcgtcctcccagcagtaaatcatcactgcactgaccgtgccttttcacatgaccacagggcaaatcagcacgctcttctgcagcctccctaattggtgtcatcttcaaaaacaacctgtggcttccgactgtggttctgcttgtgaaagtgtctccctatttctcatggaacatcttaatgtagctgggtacttggatctctctgcaccttctcatttcaccaagctataaaatgaaggcctataaataggtgtgataagcagatcaaggccatttattgcagaaccttcctcctcacctcacctacagcccggagcatgtgcatgcagagcaggcagtctctggggggatgcatccaagactttgggtattagaacaaggcatactggggtgtcaggggcagagatttatctcctctcccagttggagaggggagggctccctccttaggcacctgctccttctccttgtctctgcccctgccttttctctgcctttgattaattttttggaggggatgatgtagtttagagcaattaagttaattgtcttagaaatcatgatttcttttgatgcactgtttcctctatggaaacttcctgactcttggttgctgtcagtgtttaattatggttgtcaggcaagatgatttgaaatgattaatgggaagatgtatttcaagaacaacagcaggcatttttaaattaatttttaaatagactttattttttagagaagttttaagttcacaacaaaattgagaggaaggtacagagatttcccatccaccccctccctcacacatgcacaacctcccccattatcagcatcccccagcagagtggtacagttattacagttgatgaacctgcatgaagcattgtgatcactcagagtccgtagtttacagtggggagcatccttggtgttgtgtattctgtgggttcgaacaaatgtgtaatgacatgtatctaccattataatatcctacagagtagtttcactgccctagtgaaaattaaaatttaattacacaaataatagatgaatgcatgctcctttaaaatattaaaacattacacataaagctaaagtctcttttttccaccactctcaaactcagatcttgccccagaattagtcactgttatcagcttgtttgtatgcttctatttgtgccccaggtaaccttggaggatagagtgatgatactaattacatctctgataccattgacaaaggagctctagggctaggacatatactggggacttcatatgattctcccagtgggctgagcatggtggcttaaacctgtaatcccagcactttgagaggctgaggcaggcagatcacttggggtcaggagtttgagattagcctggccaaaaaggcaaaactctgtctctactaaaaatatataaattagccgggcgttgtggcatgcacctgtaatcccagctacttgggaggctgaggcaggagaattgcttgaacccaggaggcagaggttgcagtgagccgagatcacctcactgcactccagcctgggcgccagagcgagactccatctaaaaaaaaaaaaaaaaaaatcatcccagcaaccctataaggtaggaggtgggtactgttttgttaataacagctttgatgagatgtaagtcacatatcatgaaattcaccatttaaaaatatacaagtaaacggttatatattcacagagctgtaattcatcaccactaattccagaatatttttatacccccaaaagaaactgcgtacccattagcagtcactccccatcccttccctttccccttccctcatcctctggcaaccactaaactatttcctgtctgtgtggatttgcctcatctggacatttcatataaatgggataatgtaggagtggaattgctgggtcatatggtaacttcagatgtaacattttgaggagcatccaaactgttttccaacgtggctacaccattttacaccaatgccactaacaatgaatgaggattccaatttttccacattcttgcagcacttattatcatctttttgatttcagccattctagtggatatgaaggggaaactcattgtggttttgatttgcatttccttagtgactaacaatgttgaacatcttctcatgtgcttaatggccatttgcatgtcttctctggagacacatctattcaaatcctttgcctatttttaattgggttatgggtctttattgttgaggttttttaaccctgttgtacagatgagcacggcccttcctctgtggcagtgcacagggaaggcagaattattgtgattttcagttcatatgaaattccttaagtgttgggcttgagttttacttcaattataggcttatcttttcttccatgtctaaataataatagtattcatttgttagtagatgacagacactgtattctaaacactctactattctaaacaactctgcagaaactgaggctcagaaaggttacattactagccaaaagttaccgggtaagagaccaagccagggtccaagtcaggtctattgacttcagggcttgtattctgaagtcaatacttagccatcaaaagagacaaacaaatcccgtctgccagtgtgtgtgcagaacccgtttgtctctgtggcagtggtaaaacaaatgaccaaacaaaacaaaactgatgctgtgatgctggaccttcaagctagtgatgcttcagaatacaccacaccagactacctgtaaaacatctgctccaacaggttgcaggctgctcaggttgaaattgctccaagctgggagctgcagaactgaagtagcctttcagcaaaattgtgacttctttgttgagagaggaagtctgaagatgtttcctggggcctcacctcttacctgctatttcctgagagtgcttcgtcaagattttctcagttctgtttctggagacagagcaggaaccattgacttgaatcacgttagcactgtgagtggggagaagcattgactccctggcttctccccacaaagagtcaccttgacaggcccagtaatatccctgcagccatgggcgtgctgggccatatcgttgccctggtggaggtctggcacaagactcagggaggggacattctttctctgaagccaaagcagatgttttcacttcatctggggatgaatcatctggggaatgagaacagtaggcaaggaaggcaggatcaccattatcacaggagatgctttatccggcacctactgtaagtgtaccaggtttcttgaggcagtgcctggaaaccttgatcctggtctgcctgcatccccctcaggaacttgactgcttgggctctgactgcatgcctaccatgtgtcaggtcttcgaggaggagtcccagtcctcaaggagtttaaagttttgggtagagaaacgtgtggattgccaagttactgcaaagtggactgtgataaacactgtcactgagctctattaagcaagtgacaccactccatgaacttggatgatcatagctctttcccatctacacagcaggttaatcattctcaccctgtgtaattcacaagaatgactcgggagtaaatgagaccaagaatgtgccagagttgagtgtactagtggtgctaacattttggaatcagagatccctttcaaaggctgatgaaagctttggactttcacctcagaaaaattactctggagcgtgcgcttatatgactttgcaaacagtttcaatttcatggtttttatgaacatcctgaaacccatccatggacccttgtgggggacctgtaggtcaataacgcctgtttcggtgcttgttccctgaaggatgttttaaaagtcccagataaattcacattactattattaggaatcctatgtttctcagttacttctatgttaaaaatctttctcctaaacaattatttgctaaatatcccttataactaggtattatttagattgatgaactttaaggataaagcaaaagcaagacaatctgattggccagatttgtcttctgttttgtgtacatgtataacataaaatggaaaacaattgcagaggtgcaggctttaaaaaaatacagaaacagagcacatcaacctggattttaggtgtgacatcttgcttggttgtgtatttcaggggctgcagagctcacaaagctattgcggggaggcagcgttaaatctgttgctcttgtaaaaccaattgtatggcatatagctggggtggcgtgtgtataggaagctgagagcattggtcacgccagttctctgagacgggaggcaggattgacagccacagcttggcctctgtgctgggggtggaatctgctgcgtgtgcagcctccttcctgcccccctcccccgaccccatcctggcaggcagtggtgctgagcagatggaccccatccccatcttgggggcagatgtgctgctgactgccccatctgcccactcctgctttacctctccctctctctgggcacctgcctccttgctcccctgacgcagcccctctgccggcctctccctctcagtggaatgttctgtcccaggaggcattgcatcactgctgaccagcctcctgctcctgatgactggtttggctctgaccacgaaagggctcaggtttgggtttcagggctgctgtgggtgtctctgtcctaggtggcctgtctcagagttggagatggtaaggtcatgataccacccagcatctctacagcatcatattttctccgtactagagcactttctaaggtctcccctatcctctcatggcatgggttactgttccaagcatcagcaatgagtgaggccctctattcacttgcctgtcactctcagggtagcagatggaggcagtattactctgcacccaatgagagtttcactggtgcatagcttggtgattaaccccagttcctctacccactggatatgggatcatgatcaagtgatggccctctaagctactcagtgtctttgtctgtgaggtgggactaacacccgcttctttggtttttgaggattaaatgacattgtagaaaaactacaaagtttggggtcctcaaaaccacttccacttctgatgccagttgcaggttcaagggtctccaagaccacattcaggtgttagaaagtcctacagcacttactgaaagtggttataatcaaagttatggtttattgcaggaaaaagatacaaattaaaataagctgagggcaggggcccacagggaatctcacctgagcctgtatttttgttttgttttatttttgagatggagttttgctcttatcgcccaggctggagtgcaatggtgcaaccttggctcactgcaacctccggctcatgggttcaagcaattctcctgcctcagcctccggagtagctggtatcacaggtgcccaccacactgcccggctgattttttgtgtttttagcagagacagggtttcgtcatgttggccaggctggtctcaaactcctgacctcaagtgatctgccttggcctcccaaagtgttaggattacaggcgtgagtcactgcacccagcctttttttttttttttttttttttttttttactattaagaaattcccccttttatctttagttgacacataatgtatgtgtttctgggatacagcatggtatttcaatatgtgtacataattcattttttcagtttttgggtttctgattcacgcacggtttattctggtgtttggtgtcaggtgtgggctgcaattgtatctttttccaaatgactctccagttgtcacaatactatttattaaaaagtccgtctcaaaaaataaaaataaaaaaaaaataaataaaaagtccatcctgttctcacagatgtgagacactatctcaattatattttaaattttgtatgtagttgggttgacttttaaactttctattctgttttagttgtctggttgtttactcatatgcaatgttttgatataaagaagaccaaatcacttccctcttggctcttatttataagaggcttatcagttaattttgtatatttttctttttttaattttactttaggttctgggatacatgtgctgaacgtgcaggtttgttacataggtatacatgtgctatggtggtttgctgcactcattagcccatcatctaggttttaagccctgcatgccttaggtatttgtcctaatgctttccctccccttgtcccccatccctcaacaggccccagtgtgtggtgttcccctccctgtgttcatgtgttctcattgtttaactcccacttatgagtgagaacatgtggtgtttggttttctgttcctgtgttagtttgctgaggatgatggtttccagcttcatccatgtctctgcaaaggacatgaactcattcttttttatggctgcatagtatttcacggtatatatgtgcaacattttattgatccagtctatcattgatgggcatttgggttggttccaagtctttgctattgtaaatagtgctgtaataaacatacgtgtgcatgtgtctttatagtaaaatgatttataatcctttaggtatatacccagtaatggaattgctgggtcaaatgctatttcttgagcctagtttttactggggctcactcatgtagctgacagctgtgtggctggcctaggtctccagcctctctggagattgagttgatgctgcatggcccagggcccctgccataaatcacgttattagactatctgggtagcccaaggtccccactcttctcaggcagtacaatctaagggtttagaggttacctctcagagtccaggaaagggaaaaagccacactttttttttggataaggttgattctttactagacaggtagactttggtagactttggtaaattgctgttagtgctcatttttatgcctcagggtcaaggtgagggggagtgacttcaattttctctctttctcctttctctgtaattatgtctgtggtcttgggagggtgtcattcattgtgcctacttgaagttattatcagggtgtgtttttgcccaatcataatgcttctcttttgtgtggtgctctcaacctgtcaggctcacgtgtgcttgtattaagcctcacaacaacccaaggaggtgggtgggcaggtgtcattattccaattttacaggtgaggcaggtgatgtcataggaagcttgctgagtcgccaggtctcaggactgacagcaggctgtccctgggtatctttccacctcctctgctgacccgctgagcgatgctgctctgtttatgcacacagccttgaactagttgggcctgggttcagatctggtccctgtcacacccaggctgtgtgatcttgggcagaatttcttcactgctcccctgcccatagggttgttgtcagaatcatgtgaactgaagcatgtaaagtataggcttttaatactgttcgccgagacagaatattggttactgttgctgcaaccatgacagcaataatttcttcaagcgttctgctaggtgtataagaaattcagaatgagaaagtatcttgaatacagagaaggcaatttatggcacaagatttaagaacatgccacttaaacgctcccaattttaacctcaataatccttttcacgtaactaccaggtaattatttaaatagtcaataaaataatatgtgttgttcccaaagctctctcctgcgaggggttgtctcttccttcaggtcctggtgcctgggcttctcttttctgcccttcctgcctctccttctcacctagtaaaccttgcacttttttcaaatcccaacaactttccaactccaggtgaggttcacaccctcttatttaccctttcctttgatgcattgatcaacccacagtttcacaattatttgacagtttgattaatatctatctcttcttctaggctatgagccgcaggagggcagaagctgagatcgtatctcccagatttggcagctgctgccacttgcagctcaaacctaaaagtcaggtgtgatcagttagaggctccaggggtgattcccagccgtccgtcatcactgtagagaacactggcccttgtaccctggctgtagcgcagacaggcctgaggggaaccgcatccacctccgccctagatgcgatgttggaatgcttgagaggccctctcctgaccccctctgtcaggaacattaatgtcatttcttcccccttttatttatttattttttgagacggagtctcactcttgttgttgcccaggctggagtgcaacctcggctcactgcgacctacgcctcccaggttcaagtgattcgcctgcctcagcctcctgagtagctgggattacaggcatgcgccaccatgcccggctaatttttttgtatttttaatagagatggggtttctccatgttggttaggctggtctcaaactcccaacctcaggtgatccacccgccttgacctcccacagtgctgggattacaggtgtgagccaccgtgcttggcccttctcttttttaagactagtcccaagcaccaggtgctcatctgccttgttagctctgcatgcttcctgggagaagcagacccctggataaatgacagcagctaattggttgcttagaacacattcaagatggtttcctcggacttctgttctcctgactgtgcattaacatagcaatgccaaggcaaagtttctatggcaaaggtttaagaacatgcaaattgaatgcgcctgattttaacctcattaatcctggcttggagatcccccgacctcctttcttgggtgtccagctccagaatgcccctccccctttcacaggtcctccagcagaaatgaacacggcttcagtcccgaggactcctctagcctagaagaaggaggcagcattgtgcagactttggagtcagacagggtggggttctcgtcctggctgtgctattgacattgtggccttgaacaagctttaagttgctaggaacttcatctgtaaaatgggcagaatgcccagcccatggtcagccctcagaccatgccagcatgtcctcctctccaaagttcattgcggtgggattgagtgctccctttccaatctctcttggagtcctgaatgaggacaagaagctctgagacctcatgcccagcccctccttcctttgtgtttcccaattaaataactgcaagagcaaagtcatgtgggagaggccggcaggcagggaatcaggaagaaggaggagggaggcatccttcctggtttctttctacctccccaccctcctacttgaagtgtcaagccgccccccatcctgcttagagcgtgcacacagcaccaatcgcttcgtactggccccattagaaaccagtgggctagagctctttaaccattgtgtaacttatatgctttgtctagaactccttctgataagtatttccagtggttcattcactggccatagtgagtttgaggtatgaaactgttttgttttattttttctcggtatgaaaggcagtcttttctctaggtactctgcatgaggccacttctcgatatttgggggctggttgttatccacgttgggaaatcaccagattcctccctcctttcttatttcctctcacctcctccatgtctgcccacaaattcaaacaaaaaacaaggaagcgaagaagctgctaatttccctgctttattcctttccttgagagaatgaaacaaggaagatggcaattcatttggttccttggtaaacaataaaagaatggactcaatgaagagagaagctaaaattgtgttttggatttccacaagttcagtaatgttctatccataggttcttacacctgtaccctgggtcacaaattccctttgccatatcccatttctttctgaaaaactcaggaatccaccccttttagctgaactcataaatctgccttagttacaattctgtcattttctacgtgtgctgccatctttaaaaaataatttttcagaagccttttatactgtaatttgtagaaattatcatttctccctcttgttatctaggctaattcaccttagaattttctgagagtgtgctaatgaaaatagacattcttatgttagaatggctcctaaaggcaaaagctgcatttttttgtccacttcagagtttaggcttcttcaggcattttccttagttgtatgctgagagtgttctcttcagcttaatttgcaaaatgtccttttttgtgttaagtttactgttgtagtaagattcgaggtataaagctggtcttttaaaatccttacccttgcatttggcattagatgcctctgaatctcacattcatggaccttcaggtccatcttctccatgtgcaccttcagcacctctagagctctttcttgtctcctcaatcttctcacctatgtttttctaaaaggactgtgcatctcaaacaatgccactttttatcttaataaccatacttctgatagtgacatttttccctcccctgctttttgccttttctcgagagtatttcttatacatagcatccttcaatattcccatgttgcagttctcgttggtttatctgtttcatggtcatctccacttttttctattcccctgtcccctcgcccctgctatttctatggagaggttggtattgattttctttctctgacgcgctgtcagtcatggttatttctcagttcctccatgctctttcctatgagaattattttttatgaaaatgggcatcccttctccagcttcctctcagattccttttaaggatttaggggaaatgtttcctttctccttcagatgatttcaattgcccaccaatcctgacttctgacaaaggcaaaaccaggtttccaagggcaaattcaattcactgctctgtctccagcagttagggttcattcttaggttctgaaatcattccctaaatttcttttatttctcaaactccggttttgcctttctggggtccaggggccttctgggttaagtgtgagtcaccgccacataaattctgcccttgccgttcacacgcaccccatcgttgggttccagagcaaaaactcttcagggagcctggctctttctcctgccctgagaagactgaaatcatgtcaagggtgagaacttggtctcctgagtctagaagttttgaagacctcactggaaatcattgactgtgttgacctctggaaccatcagcatccctcctggttccccataacagaccccaggaaaccctaggaaaccttcccaggctgcagaacctggaaacaagaatgaccaatctcagtgaccaatatcatcagggctactcaccaggctcggaaaatctccttttgttcttctattttccatatggaatcaattcttataagtaccaggatccctgctggacatcctaattctgtcaagattcttccttccctttctgtctctgtctcagcaccgtcaccaccgtattgcagaagggaagcttgtaaggctctgaaaggatccgtacagccagcgacaaacaatgccctttcagaaaatggagtttctttactacttacttgaagttgttcttgggatctctttctgcccttcttgctccagagctggttcatggtgtctcaattcagttcatccccgtccccaaccctgatatttcttctagtgcagaatcagtgaccccttccctgccctcacccctggcgggggatgtgtaatgttgagaaggaggatgaggtgaaaccacacggtatagagccgggtgtatggctgggaggattgacgatgtggcttccaaatacctacccaaacgggtgtcttttggaggacgacactgcctctggataaatgatctctgggtacacagaggaggcatgcagtgatttgtggttactatgaatagaattgcccatgcagggctagctccttggggttctgtaccctgattgaggtcatggttaatcaggggtgcattctctttcataatccctggggatcttgcctggcatttttgtttagctggagaaatattggcttcgctctggccacaaatttcccacactggcgtggctcggcgctttctggctgccttggagatcctgatgcctgtgactttgcagaatgcccaggaactgctcgctcagctactttcactctcgctctaaagataatcgcctctaaagcaaggtaatggacatgttttatccccagcaattcggtttgcccttctggggtgcttctcaaaagaacagcctcagagatgctgacacgtgacttcagctaaccagcttgtgtgggtgtgatgtttaatcatgcctgtctttttcttatcttttcattatacctgcgaatgtctgttagccacatccattagatgcatttcttctcttttttttgtaaaaatcaaatcaacccctcccttccattggatgaggagataattatcatcattcactgaaggtcgacattctgtcttgaattatttgtctttgggcaagagcttgaaagaagcattgtaattccaacatatcttcttgattaaatctggtttttagaatgtcatagagtgtgataagagggtctcatttgtgtcccaggagaaactgattcgtgcttccttggatgagatgttgagcaaaaggatggtgagattgtaggagcagaaagagggatggagaagagactagaacatggaaaatcaggtccacaaatactgctatgtcagtagagaaatggcccctcaagattggctctgggcactcatacacatttgtaacttttaagtcatttactttcagatacagttttgagtattctttgaactacaggtgtcactggaaatgattccctctgctcaatatggatttgcatctatgttgatttcatgttgttacctaccttattaaatcctgtgggtgaactcattttattctataagccaagatgctgtctttttttttctatcatggaaccaatataaaaattccctcttttttttttttttttttgagagtgtccttagtatacccagaccccccaacccattgaggtcagtaattttaatcttaagaggagatattttctcatttgtaaaatagggctcctgactcagtttcttgggtctcttcccagagatattctttatttatatacagtgctccccactcatgccccctgaatctgcaactttactttccacagttttagcgacttttggtcaactacaatctgaaaacgttaaatgggaaatgccagaaataaacaattcctaaattttaatttgtgagctgttctgagtggcgtgatgaaatctcctactgtcccactctgttcttcccatgacgttaatcatccttcttccagtgtatccacagtgtatacaccacccatcctagcatcacttaggagccatctcagtgagcaggtccactgtcgaggtatcgcagggcttgtgttcaagtaaccattattttccttgataacaatcccaaagcataagagtagtgatgctggtgattcagatatgcccaagagaagccataaagtgcttcctttaagtgaaaaggtaaatgtttattccaggtatatataggaaaaaataaatagtatatatagaatttggtactatccaaggtttctggcaaccagtaggggtcttggaacatatccccccattgcagataagggagaactaccataaacatgtatctgcatgtattttttttatgtggaaaggaacatatcatgcatactgtctagccaccatacttaacttcgttttgacaatgtgtctctgaagagattgtagcctgtctgcacacaagcctgtaccttgcgcttttgtcctgattgaatagtgttccattgtataaattattataatgtgttttccgagcctcctgttaatctagattgtctctgataggttactattactgacagtgctgcagtgaggatccttgcacacccatcttggcatgtatgtatgagtccatcggaaggatacatttctgtaaataggattgctgggtgaaaggtatatttgcttttgttttgatgaaaacagtcatctagcgcatgagcatgtctgtttgccccatctcaaggttttatgccttctagttaagcatcggctactacatgtagagctcaggacactgacccatgcacgaaaggtacataagtcaaagttactaattaacatgtatcttagtaggagtttggggtatttgttcaggattgctgatctcatggctagattagtgaacattcaccccaagagtgaaaggctctggaatttaaccacaagcttaggctttgaagatatggtatctcccacccatctccctctgatggcagattaactaggcggtgggcagaaccaacccttccacacgccagcctgtcttccttagagagcacaagtgcatttgcccagaacattcacactttcagacctggagatgaaacacaattttttggcagcaaatctcaaataacatgtatttaggattacaaagtcacagttttgcaaccagagggcttgggaaggagttgcttaaagcaagaaaattgcaatgcagtttttacaaaaattaaagatataaagtccatcttcccaaattacattccacacatttacttctctacaaatgccatttgcacacaatatacccagtttgcactgaattccattccttgcttctttttcccttcttagtcacacactatctgtgcgtgtcaagacactgttgtataaaactgctgtatagaactaggtattttattttgttttgtctttgctttaaattttatacactttttggattaggtcattgaatacttatcctgttttcatctgaattttcttgggagagaaaatttaaatatttaccttcatcttaaaaaaaaagaaagaaagaaaccaatccagatgacagaaactgagagggacatggtggttgcaggtgtccgtgtgtgctgggaatgcagaaacatgcctggagcagtggaggctgtgctctggctctgccaaacaccctgtgggcctattgagatccaccaccacctaatggaggaattgccttctttcctttttttcagtaagctcttcattgaatgctatggtttgaatgtttgtatccctccaaaatgcatattttgaaacctgatccccaagatggtggtattaagaggtggagcctttgggaagcaattaagtcatgaaggcatgagtgggattagtgctcttataaaaaagacccggcctggcgcagtggctcacagctgtaatcccagcactttggaaggccgaggtgagcagatctcctgaggtcaggagttcgataccagcctggccaacgtggtgaaaccccatctctactaaaaatacaaaaaaattagccgggcatggtgttgcgcgcctgtaatcccagctactcgggaggctgagacaggagaatcacttgtacctgggaggcagaggttgcagtgagctgagatagtgccattgcactccagcctgggcaagaagagtgaaactctgcctcaaaaaaaaaaaaaaaaaaaacaccccacacacacactcaaaaacaacagagcttgttcaccccttctaccatgtgagtggaggcagcaagaaggcaccatctatgaggaagtggtcctcaccaggcaccaaatctgctggtgccttgattgtggacttcccagcctccagaactttgagcaataaatttctattgtttttaagttacctggtctaaggtttagcaatctgaaatgactaaggtcctaaagtataatgtatagaaataatgtgtgaacagcttgataaatttttacacagtgaacatatccctaaaaacctgcatccagatcaagaaacagaacactaccagcaccccaggaacaagtggctaccttttgagtcactcttcagcctctgacgatctttaacaatgttgacctctctgaagatagattagtttgcctttttttttttgagtttaacgtaattggaatgatatggtgtatactcttttgtgcctaagtttcttttactcagttttatgttcgtaacattcatccatgttgtagcaaataattatacctggttagtgttcgcggctgtgtagtattccattacaggaatacaccactatttattcattctactcttgatggatataggttgtttctagtttctggctattacaaagaatgttgctgtgaacattttttacgtgtcttttggagaacatatgtacacatttctgccaggtatacacctggggtggaattgctgggttgttaaatttccttactggggcctataagaccaggtcttgcctgctgctagattcttgtcatcattaatcatcatctatatgccaggcactatgtgaggcattgggaatagtaaggagcagaagcagatgtggtttctgcttttgtgccagcattaattaagcaaacaccaaggtaaggtggtgtgattgccatggaggtaagtgctgaagaggaaagaggcaggatcccaggacagcttactgttaggttttttaaagggaaggtgagggttaaagaaaaacagagagagagttggcggccctacagcaaaacataggctttatgtccaacataaaacctgcagaggttgggggccagcttaatgccagtgcccactgctgcttacaggctggggcaattataggcctgagcaggaggggtctggggggagcatggcctgctgcctgggaaaatgttgataacatgttcccacgatgaggtggtttggcccttgttctggtggaatgtgatgttccttgccctttctcccagcaaagtcaggcagttggtcaggctgtttctcacggcccgaaccccccgtggaatgtttcactttgaccaaggtctgtgaaatgacagggagcttacgaaacggtgcaacttggactaacacttatgacataggaagtggatctgggctgggggagagggtggcatggaaggggggctttcctgaaacagtgacacagctgagattggagggatgaggagagtataccagggtacggtgagggagaagcttcccaggaagctggaagagcacgcggggcatgttcctggagctgaaggagtgccaaggtgccagagcatggaggcgggaatggggatagaggaggtggcgaggctgacattggggttggggctgcagcctttgtgcctgtgatgggagcccagacctatagctgtgaggtgtgttggtctgagaactctccagatctcgccttccttgcagattcgtatcacagcagagcaggaagggcccattcagctacaagaattagtaggaagcatttgaaatggtccacagctgctcacaatccttaagggagtttatctgtaactgagagagtatggggaggtgtctggacagtcaggaagtacctgtcgcaggtggcattttctggctgggcacaggatcagatggatgtctttctgtctgttgacaggtcctcctgaggaccaaggcctgcatagtctgatttatgctatatgtatgtaactactttagtacagttgagggctcttgaagtcatgctgtgtttttaggaagatatttgagcaggagatcatgaaaattttgcaagaatctgcaatctggaagagtgttgattcaatatacattcattaggtgcccactctgggttactgtgtctcgcactgtcctggacactagggattcagcagtgaacaaaaacagacaaaattccccaacctcttaatgtttatattcatccaaaattttctttcaaaatggattgttttgatgagctgccggatctcttgacccctcagagaattttacattagggaaaagtgcttgtgtgtaggcataagaaagaaagaaaatctaggattggaaagttggaaaccagttttctacagccttccagaaagaactcaactcgaggactgacgtggtggtggaaggcagagtggcaggggaaagagcaccagcatcaatgtgaacattctagctgggacgcttccttgtggtacgacttggggcaactttgatcttctaaatgggtattaatagttcccacctgcaggactgaactgtggaaatgcactgagatccagcagttcaaatccctggcctgagtattgggtgattgttgcggtcatgaaggcatgaggcttctgtgcgacctgggtgactaacacagcccacaagcagtgaggaagccactcccagcggccctgcccgtctgggtcctcctgccctcactgggtgttcccagccccactatactgtctccctctccctccttctccaagtgcccagacctgctccagctgcccctgatactcagcaatgcagacttgtctggaaacacggacaacaaggcagcttggcatttccgagccaactgctgagatgaaacaggttcattgtcaaggccagggccagggcaggaagtctagttggaggccccagggtagctcgccccagagttctgaaagagcactgtttagaattttgtaaccatctgttggcttgggtatgtgtttgatggctgtggctgtgggttgaggtggagtaatgttgaccttggaaggttaggatgcttttgtttctgatgagaccatctagtgtaggtcaaaaggactgtgtcggagatagaaaacaacattttttttaagttgggtgtttttgaatcagccaaaccttaatgcattgggcagaagtggcccctggggtagtaccagcttggtctgagtgtttcatgggcaagggtgggggctgggaagagaagcttgcccaaggccctgctgcagagggaggggcaggagagctagtgggagccaggtgtgtggagctgcctttcacagaactgggttatggacccaccagagagatggagccccttctctccttcccttcccccatgtctccctctcccaccagggcttggtaggggtggggaaagcaagtttatggccaccttgatgttcactggagtggcccgaggactcctttttgagttaaagtgacttgttttcttcttacctttattcatccccttactcagtaggatggcagcagatataacatcattatgtgtgtgaaaacatacaaagacactcgttctagggggtgttgtccagcagatgcatggacgtccatgttaactcttgtgagtacagaagaggatgcagaagttagctggatccagatgctggatctccaacatccttggagatgtgtggtgttggatgcttctgtccagggtaacatggctctcattacctgggcttcagagccttctctaccttaccatctgcatttgttttttctttttgattgggtggcattcacctgggctttccttcacttcctgacgattcaagatggcaattctcatctctggtcaggctgagcttctctcagcagctcctgacatttcctccagcttgtctcaccttctcagttgtctcccattcccaccagcacatcctttgaccttatcttccatacccttctgcacctaggacctcttccactccttcccagtcaagaagcacctatgaataagcacaggtattcaatatttgttagggtggatacaggtaaaataagaaatcatctgtagaggtgacgtagaaagcacagataatagagaaataacaggtatctgcctctgtcatctttcctgagctccagatgtcagtatttaggggactgcagctgtttccacattatatcttctggcaccaacaacttcatgtgtccgaagttgaactcatgcaaactcagcctttgttttccacatgactcctccatcaactcagaaagtgaaagagacccacaggtcatcctcaactccttcctttccctcacctctaccccatgtccactcaccaagttctgccagctttcagtcctaaattttccccgaatctctatcttctctccaagactgccccaccaagccttctgccatttgtcaactcacaactctgtggcagcctgaaattgttttcaattcccagtagctatgtacctgagggctgccccctgccccccatcacctggctttgtcctactctttcaccaagcctgagctcagacctcacctcctctaggaacccctccaggaccagagtacatgacccccctccctccccaggagagccctgcagtacctcttccaggatcctgctcctctagaatgcccacttcccacccagtgtgaggatgatcagtttacgtgcctgcctccccatggacgtacactcctctagggcagaacccaaaagctgctgaaattatctttgcccagtttgacagagggagggaaatgtagtggactgaaagttgagacaccaggttcagcctgaccccagtgagtgctccacccttttttgtagattaaatgaacccagaagttagttcatgatgtagttcctgtaaaaaataataaataaacctaggaggagcctcaaagtcccttcctgacctgatgttctgcgattctgccagaggaatctgctctctccagcctgacttttctatctacacctcctcatcagaggagccttctgcactactgccctctcccaagtcaggggctggggacaaggaagactttcacttttcagtagcttcctgagccatttctttcttagctcccaggctggaggccttttcccaggtctctaatggacaaactttccacacatgacttaagagaagaagacacaggacttggacttggacagttttgctgcatgaaccactgaagtctctggaaccttagcaacatggacccctggaccttggtcttgagtgtggggcctgtgacagtcccctggcagtgtgctcatcctggcctttttctggagctactaaaggaaagaaacccagttgaacccaggatttttttctttacccccgaacttctttgtacagaagtttcactttctcataacatgatttctttcttttacaaaagacaaaataaaacagaacccaaacttgacacacaaatccaaccactactgctactgttcaggcagctggtctatattttagtagctcacctgtttcaaaagcacctaggtagtagctgggaggctcggttagtatttcaaacccccaaaagctgcacaaagcagaggctcgggttcttgagtagagggctgatgctagaaacataaagagattcatctgcatcttcttcaacagtgtgcctcacctccaactctcactgtgaaagatctgctttctgctgagcatggacctgggagagatgtgttccccggaaggcggcccgggctgtcatcaagtcagttgcacagggacagtgtgaagccttctcactgtggcacgagccatcactctcagagcacctcaagcctggcagggttccgaaaacctcagggtttaatcactcccctgtttaaggaactcagacacaatgtattttacaaattatttttgaaaggtttatatgaagtgttaaattttatgaactgtatattttaccaacaatggaaaaaaaaggcttatgagcttagaggctttcacattcattatttcacttaattctctaaacctccaatggggtaaatcaatttctgttttgcagaccattagaccaaggcacagagagattaagtggcttgccaaaaggggtaagagttttcatgggctaactggggttatttttttcacagttcatcaaatgacaagtttaacgtgatatatcttattttatgttgcatgtgataaatagttacactttttatttgttaattactaggttttaatggtcaactttagtccaaagcttctccctcttctcaccttctcccagccttctgattcagtttatacatacacacacacacacacacaacatacacagaggcacacacatgcatgcatgcatgcaatacccacattgttcttttatattattattattttttgaggtggcatcttgctctgttgcccaggctggagtgcagtggcacaaactcagctcactgcaacctctgcctcccagttcaagcgattctcatgcctcagtctcctgagtagctgggaccacagatgcgcaccatcacacccggctaatttttgtatttttagtagagatggggtttcaccatgttagccaggctggtcttgaactgctgacctcaggtgatccgactacctcagcttcccagagtgctgggattacaggtgtgagccacggtgcccagctgtccttttatttttatttggtgttccttgttggaagagatcagcttctcttcactagagaaatttttcagtgatcctggtgggggctccagtccccttttctttaggaagaaatagagtagaatgattgggagtacagtgacagggtggtgtcacatttcctgagtttgagcctcagctcttccacttgctggctgtgtggcactgggcaaactccttcacctctcagtgcctcagatacctctctatacagaggaaatgcaagcggaagtataaggaagatcacacgaaatagcgcctgtcaatcactgtcaagcacagtgcctggcacacagtaggtttgcaggatgcctgtggtttctgtcaccctgatgtgactctcctggggcccttgaaggtagcattccaggccctcagaatctccaggggagtgactgggagctgtagtttcaccagcaccgggctgatgcttgtggctgggaaacgccactaccaaggtgatgaaaggtgaaggtgggttgatatataaaataaaagaacttggaggaaagttaatacctttgaacattggttcccaaagtgtggtcctgcaccagcagcaatatccacctagcaacttgatggaaacgcagattctcaaaccttcctccagacttactgaacggaaactctgggggtggatgctagtgatattgtgtttgaacaagccctccaggtgtgtctgaggcctgctgaagtttgcaaaccatactttagaatgtgaaagagccagtccctatttcatttcaaatgagtttagatgtatatttagctactgaaataagaaatctaaagatatgtacacttgtaccaagaagacaaggaaagaaatctgctgatatgaagactcagttatatttcgaacaaaggcaatgaatccatcttggtcctttgcttggctcatggtgaaacatagcggccaccatgtgggtcaagaggcttgtgttcaggacagctgaagggatggccttgaccttactgtcctcccagcaccaaaaggagccaagagcgagaggttacttctgcctctccggaactccagcacttcctccctgggggtgctggcatctttcttatgcactgtcactctcctcgtggttactgttgtttgggtcaatgttgtaagcagttgcttgaatacaaaccctctgctttttcatccctgtttctcctgggcaaacccaaatgtgactgcaaaacatctccaaatagagtccagttcttctaagtgtcaaggcttggcccagccactgcctctgctgtaaagactttctagcctgaataccaccatggcaagtcataagccttgttcttcccctcctgtgctccacatcccagggatttgatccctgcaggctgcatttccaggcgcctgctgggtttgaacagtgcaagcctctggggtgagactgcagggtggtcggagagggatgccagggtggttctccccctcctctgtggctggctgtctgacagtggctggggatcttccagggctctattgctactcctgtccccactagcttttgtgtaccttcttgtctgtttgataaattctctggattaaattctccaagggatttggagtggtttctcttttctttattgggtcctgactaacttagccccttgtcttgcttccactgggagtggtcactcagcatttgcatacgtatcttctccaatagccatgagcttctcaggagtagccgtcatatccaattcaatgtcacatccttagtgcctactccaggagctgtcactttcaacatgcttggtgtttgatgaatgaatgcgtgataacatgtgaggagggctgaaaatgcaaaggaaaatcaaagtatgccgtatattcaaaatgcatgcaacaagcaaggtttaccatatggaaatagcgatgtatgccctgcctagtaatctagtttaaaatagtaataataaaccttaagcttgtccacagtacagattttttaaacaataatttgagaatgttcaaatctgttccattataagccaccccagaacttaatgatttagaaccctttattatttctcatgattctgtgggttatgacttgagttgccttcagctgttcttgcctgggctcgctcatcaccacgtttggtagcgattcggctggaattcatatgcgtgggacctcaggagaaatggagattctctctccactagaatctcatgctgaaggaggctggtgcgggcttgttcacaaagtggcagtcttccaagagggtgaggggcaaactctgaggccaattgaggtagaggcttggaagttacacagcatctcttcctgtgcattctgcttcaaagcaagtcaagagcccagcccagattcaaaggatagggaaatagactcatgtcttaatgggaggggcttccaggaatttgtggccatatttaatccactgtagagtggttattctcattacgaaacattctttattacaacatttagtatggctgtaccttaagtagagcctcctggaatagatttaaaaggttgctcaactggtaagacccacaaatggagagctgccactgctttccttagttctttgtctgaccaccagatggtggcattgctcagtcgaccccgagtatttcaaggccggcaccaaattccacctggagatgcccttcaagctgtgggaattctatgattttgcacagctggattgggagcaggcagtgctacctatggagagggtctgggattagggttgcaatgggcattggatgcctctttctccctgactcttctagaactgttgtgggaaatttcttcacctccccaaatgggggactggagtaagatgctgcaaatatcatcccatcacaatggactcaatcatgaagaaaaatatcgtttgtaataaaaaaattgtttgcatactcatgaattgtctatcgaaattacattgtattgatttcatcctagtgatgtaaataattctataccacttctttttcttttttctaccctctgcaccattatagttgtttgtataacagtgtctgcaaaaactgataacatttgattaaggcctgcagtctagtccattgtattgtgccagtgtcaatttcctggttttgatcatgtaatatagtgatataagatgttatcattggggaagataggagataaggacatagacctttctgtactatttttgcaacttcttgcaagtctataagtatttcagaatagaaagttaaaaaaataccctcactaaaaataacctccacctgcttgtgtattactggtatttgcatcatcatttgggagaaaagttgagcattgattttaaaaactctttttttgggggggggggtcattctggcagggtagcactggcttctcaacccccttcagatccactggccacttccacagatcctgcccaggctcaaagcacctgctagactaggtgatcagtggtgcagagacctggagccaaggatggggagagacagtcattgccacctcctttcttccctttctggactcagagatcctctgtcccaagtttctcccttatagtcagggctctgccctttactactcactttcttgtttgttgtcttaatcgtgggttacaatgcttctctaagactaacaggaagacacttttatttccattttgtgaataagaaaactaacacccagggtttgaggtacttggctgggaccaaaagtaagtgatgcatccaaggctagaaggtagattaaatgactttttaatctgggttttccttgctaatttctaaatacactaaaaagagaaaactttttagaaagttttctttctgaaagagaaagccttttagaaagttttctttctgaaagagaaaactttttagaaagttttctttctgcaagagaaagccttttagaaagttttctttctgaaagagaaaactttttagaaagttttctttctgaaagagaaaactttttcaagtgaagtaaaacttctttgaaatattacgtgtttaaactcctaggctgtaatttcatatgcttttatttactgtcttgttctattaaaatgcaacctatagcaccttttaatgttcacacagtgtttgaagtagagaaatgaaacttttatgagtaagtggagaaagtagtgttaactttttttttcattaatgagaaaacaataggcagcaatgggtttaggagttctatggcgaaaaggcatttcctgagattgaatcagtggcaaaaggagagcctgttatgttttgctaaccaaaagaatgtgggaacattttagctaaaatgcaagttaaaactgtgaaacatataaataagcatttggtatgcttttcagtttccacaacagtagtcaagccagtgagccctgtggggagggctcatgggccctggactcaaagagctcagagtatgtctacctggggaactaaaccagtgtgcatgaaatgaccagagagtgatatggggcagatagggtttcatgccagggtgtgtaccatggttgtgtctggaaacaagggctaccgaggcctggatcactcagaggaggcatcagggagaatgtactggacttgggctcaatgtagagatgtagggggtagctctcttttgactcctaaaattacagtgaaaaactgggttctcgtaatcacacttacgagttgttgtgtccctggactagttatatcttctctctctctctctctttctctctctctcgctctctgtgtgtgtgacaaaatactcataccacaaaatttaccattttgattattttaaggtacacagttcagtgccactaagtgcatttacaatgctgggcaatcatcatgactatttagttccaggaccttttcattacccacaaaggagaccatgtgcccattaagcagtcactctctccttggcaaccacttaatgtggttttcgtctttatggacttgcctactgtgtgacacacagtgttttgtggtggatgggaaaatgtatgatatttaggccttactctcaaggagcttactaattgggaagatgtaatctgagaacatgaaaaagacagttacatcctatgaccaacatcatgcttgctgggaaaaccttagaagcattcccaattacagtcagaaataagataagagatgctaaatgtcaccgctgtgattcagcattgtgctgaagaacctagccaatgcagtaagacaagaaaaataaatgaagcacaaggatggaaagtaagagacaaattattgttatgtggagatgatatggttgtgtactttcaacgagttgcttacctcttttattatatgtaatacttttggaaattcagtgtccatgtacagaaagcaatagcatttctgccgaactacagtaacctataggaaatgttatagaaaaaaagatacagttcacaataacaataaaacaatagggtacctagaaaaaaattaaataaaatatgcctagttctttaatagaaaaaattataaaacataaagtatatcataagtagaatatgatatgttcgtagataggatagctcatttgtgtaaaagtgtctcattgaagacaattccaataaatatcccaacaggatttatcttgcaattacagaaaccaattctaaaattgatttgaagagtaaggtacatccacaggtctgatatgtctaaaaaagaataaaagggtcaagaaagcaaatgaaagagcagagaaacaggcctaagaatcactgtgaatttaatactagataacagtgcatgatgaatgagtgggaaaggctgagcacatcattgacttatcttgagacaactagctttctataaaaaaagatactagatctgcatctcacaacacataccaagataaatctcagctaaaccagcatgtgaaaatcaaaatgttaacactgtcagaagccaaccccgggagaatatctttatgacctgagaggttaaaaagaattccttagaaaggatccaaaaaacacaactcagaagtgaaaaaaatgataaatttgactaggttaaagtattatgatttataggtgtataatataagattatggcctagaagtatacacataggtgttgcctctggacacagagtgaggggagagaatgggacaggggacatcagctttatccatcatgtgaaaaatgataaaaatgttaacattggttaatcctggttggtggggacacaagggcttgttacacttagaaatatttccatgtttaaaaaatttttaagacaacacaaagcaactaccaacctcagcatgaaaggtggaaactatcgttgtatagggggaaattgccaaacccaaaatcctgattgatcttatcactgccatcagcaagctgcgtccatgggtgaggaccttcctctcaggggctgtgtgctctggaaaacaagagggttggactgattactagcttaggtcctcctcccttgccagcgctcacattttctcttctctctgtggggcaggttacaactgctagaggagcagagaaggaagaacgcgtggggaagagcatcgtcacaagcattaagttctatccaagcatggggaaattgttttcattgcattcaattcttacttacccgacctcttaattcatagatgctgcctgatttcttttaagctctagaccttgctgttttccttgacagggtgaaactgggtgttctgtaatgaaatgtgtgctccctgacaagtggcagagattctgaattttctgggactgactaggagcatcatgctgctgacatcagtgtacctgcttaattgggcttcattattggtctgaaatcatgaggcctttcaggagccaagaaatacacctgggtatggtggggtgatgaaggaagggtgcgatgggtctctaaggaggtaccagtgttttaagcaaggtggtcatttgtgggctggtaatttgaaaatgggagttgtggaattctgctttacctgcagacctgctgaccacttctgcctgagttttctcatctgcgaagtggggcagactagagtgacgtagggcatgctttcctttttgccagcagagagagggctttgaaggtaagaggaaggtagtgtggttttccactggggctacatacttatagctatcactgctgtcaatctaagcagggagtataaccaatgtctccatcatcttaagtaatttgtgtgtgcacagattcttcagaccttacaggatgtctctgtaaaacctgtctgggtgctagatgacaagaaagtctgagtggaaaggcaaggccttctctaagggcccctctttaccacaggaatgaattttaagagactgtgagataaagtgacaaacataaaaagccatgtttattcatctccacagcatcatttcacaaagcccctaattctgtgatgacataccactctccaaaaagatactttaaagaccaaagaagataaaaaacatgccccccatgtcttttgcctaagtcactatatttcctaaaagagaaatgaccccagtccttgcctttcctacacataaaataatgtctgacaaaattcataattatgcctctataatctgtaaccaaatatgttcttgcacctaaaccgtcatggcaagcacactttggataaatcatttaacttcattagacttcaattgcatcatccataaatgagttataatagtaatttacttgcctttagacagggactggatgaaaccatttttggagaacccatctgtgggtttttttgttaaataacatcaaagtttattgggtaaaggaccaatattgtaaaatagaaattaaaaaaaactctattgatgttgggttttgggaaggaacttgggggagatagagcagatcctctgctcaggcacactttttttttctttctgaaagactgttttttttagagcaggttcacagcaaagttgagaggaaagtacagagatttccgatatacccccgcctccacacacacacagcctcccctatggccaacatcccccaccagactggtacttttgttacaattgatgaccctacattgactcatcataagacccaaagtctgtcctttacactggggttcactcttagtggtgtacgttctgtgggtctggacaaacgcatgatgacgtgtatccatcattattgcaccatacagaatagtttcactgctctaaacaccctctgtgctcctcctatatatcccttctccccgctaacccctggcaatcactgacccttttactgtctctatagttctgccttttccagaatgtcacatagttaaaatcatacagtatatggccttttcagactggcctctttcacctagtaatgtgtatttaagtttactccatgtgttttcatgacttgatagttcatttccttttagtgctgaataatatcccattgtctgaatgtattacagtttatttagccattcacctgctgaaagacatcttggtttctttcatgttttggcaattctgaataaagctgctataaacatctgtgtgcaggtttttgtgtgaacacatgtatggatttttgatctgctaaacactgaactaagaagatttctggatatagatgtagttgaaagggataaatatgtacttatttttttccaatgatttttcattgtaaaatattgcatacacacccaaaaatacttaaggcatctatgcaaagtttaacaaataaagcaaacacctatgtatctatcactgggtcaataaatgggatgcccctggcacccagaagccctcgagggtccctcagccatcccagcctccttcctcacttacacctttgtgtaatttccttgcttttctctataattttaccacttgtgtttctattattttgagagttacatgctctattctagaaattataatacatatatattatatatttatacatatatatatatatatatatatatattttttttttttttatgaagtctccctctgttgcccaggctggagtgcagcagtgagatctcggctcactgcaacctctgcctcccgggttcaagcaattctcctgcctcagccccctgagtagctgggattgcaggcgtgcgccaccatacccggctaatttttgtatttttagtagagacggggtttcaccatgttggtcaggctggtctcgaactcctgaccttgtgatccgcctcggcctcccaaagtgctgggattacaggtgtgagccaccgtgcctggcgaaattataatatttatactgacagtctaaagtttatcaaagctttcatttcccatagagtaactcaaggtccttggaacactctaaaaatgtttaaccactcccaacttattttctctcattgttttgtattttaattctatatttttaaagaacaccaacaaaatatattgttctacacagtggaagttcatttggatttactcatcatgcatctgtcactttctttgctcttcattcctttttgtgtttccagtcttccatctgggatcactttctttctgcctgaaatgtaatctttagaatttcccttgctggtgaggaactctttgcgtgcctgaaaactcctggatttcacttcactgtggcagggtatttgtggcagttgtcttagttttcactggttgctgtaacaaattaccacaaacctggtgactcaaaacgacacaaattcattctcctttgattctggaaggcagaagcccatcatcagtttccctgggctaaagtcaaagtgtctgcagagctgcgctccatctgcaggttctaggggggaatcttttcttttcccagcattgcgatgctgcattccttgcattgcttgattcatggcccccttctccatcctcaaagacagcagccattgtagcatctccaaatctctctcctgtcacatcaccttctctgtgtcaaatccctctttggcctgtataacacttctgactgcacttagggcccacccaaatctacccatctaggttatgagatctaaattctgagatcctcaacttaatcacacctgcaaagtcttttttgccatatgaggtaacactcacagcttccagggactatgacctgaatatctttgggggtcattcatctttcctcatcagaattatagatttgtcattattttctttcagcgtattaaagatattattccactgtcttttggcttccatttttgatgttgagatattttttagtctaagtatgatcccttttaagataatctgtatatttttttctctaagcttttctcttggttttaatcactgtgatcactggtaactacgatgggtctaggtgtacattccttaacatttactttgcttgggattctctggtcttttgaccacttagtgtctttcaatagtcctggaaaattctcagcttttatcttttccatattacctcattcccatccccattgtcctcttttgggactccagtcaaatatatgttgggccttctgacttatcccctatagtctaaatccactcttctgtgctttccatatttttgcttttgatgctgtattttgaacaatttcctgtgatctaacctctggtccttaattctctcttctattgtttttaatcttttgccaaacacttcaataagattttcatttgtttttaaatttttcctttctagaagttctgtttgattcttttccaaatctactaagtcagtttttacagtttttggtgctctgcagatatttgcaagcttgtttactttttcatgtggttagcaaatataaacttactgagtttgcatctgaagtgtgtccaggtcggtttctgctctctgctgtttatgctggttctcactcatgttgccttatttccttctatgcctgatgatctattttctgatacgcctgacaatttcactagttattgcccgtaaagaaattatgtgtggagatcccctgaggcttagaatgagtgtgctctccttcctctggttgccttttggagtcactacaaatgaaattcattgtccatgtatgatatagaaccctggggtgcaaatctggatgagggcaggcctctggtcacatctcaggggtaattttatccccttcctacttcctctcttgctttgctcaggtttctctctgggcctatgggtttgggggggacaggaagtgacatattactcctggttcatcctaatcctgagggtgtggccctttgggacccagcttactgtaggtatatgtctcctgtaagagtctacatcagatgtgctctgggccctgacatctttcatccttacccctttgatgtctgcaaggcaaaagcagctttggcactcaaatcatcctcgagtctctttaggttaaagctttctccctaaatcagcctggtagggatgtgctatcattcagctcttcagtgtttttatggttacttactcagagttgtttttagctgagggctcatccaataattcaatcacctaaccttccctcgtaggaaatagctattacatttctattgtgtaaaattttacaattgtgtttaatatttatttacaatttaataattgtgttatgtgtctttaggaaatttagaaatttacagtgcagaaaaaatcaagggaatgtagggccacaagtttttatttgctttaagatattagtagccacatgggatattgacctggtgtcccatcttgggggaaaaggtgagagacttttactggttgcacattaacactggggaatggaaaagcccatcttgtttgatgccatctgttgtttcctcaaggggtaactttaattggttggccaataagtttcatccttgccttaaaaaaaatgaccaccaagggaaaactactcttagctggcttcccaaccacctcagcctggccctgagctgccctggagtggccaccatccagccccttcaagttagggcagctggctttgattcaggctgtggagacagcgttagtcagcagcctcttctctcatgcatgccctgatctttaacgctccaacgtgcatctgtgacaatgacagcggattcctgactgtggccatggctcaggatacttcagtggataaatttgggccaggtttgtgagtcccatctttgggctcccctcaacatcacgatttagccagttggtgttggatcacgattttaaaactttaaaccttgagtgttaagaatgaattcttgactgttcagtcctcatatcccagatttggatggaaacctctgatgctataatcaacatgaggaaaagcctgtaaatcatttacagattcagaaaacacttaatggacttctcctctgtggaaagcaccatgctgggtattgtggcatccgtgccctcagaacgcttctagtcttttcctatacagagaacacaagtatgcccacctaagagagaagctgagatttagaggagccactgaggatggctgtgaaagtgatctggctaggatgtttgtcatcccattgctcacgaggtttgatgtggctgatccgcctagctggcatctcttccctcctcatacctcaatgcacattcctcccacatctgggctcatggcagtgaatgtgacctttctgtccagaggagttctatcatttggtcaaggtagggaggtgattgtgcttctctgtttaagacttagcaaaagacaaaatgcagaaagcctgaaggtgggagctaatctttctggctgtcaccaggtcttatacaaccttgtggttgtcacgatatatgcatcagagcagaccccatttcctggaaatcatttcataatggatactggaatttgaattaataaaacttagaaggacccaaacttggtatctccttgccaattctctcaaaattgagtgttctgcagtgttcctacacaagtgaggttggtgcatttattaattaatgtcactaagagatcagttaaagcctcagcaaacaattgccatgtgctctttcagggaaaaacaacttacaatcagatttgttccctcagcaagaattagaggatatactgccaaagtttctccaagctgccccctctttttcttggcaagctattgggctgttagcttccagtcccccagcttccttgactatgaggattccttcctagtgtggttcagagcacagattccacctgcttttattttgctttctaattgcttattattctcccaagcacacactgtttttctttgctctattcctctatgttgctgaatattttgatcctaaacaaaggtgacttttgtactcagcttgttatgaaagatcagtaatatgtgacatgtgatatgttttccaacttttatatctttatactccctgagtgtttggccatggggttcatgttttgctgagtataatacccttgccattcaaattttaattgaagtaaatagtaaaacaaagttggagtagagtgggtctttctccttctcctgatccagaggaggcacccaaaagtactcacagaatatgcgaagtattaggatactaacttcttaaacttaggatagattccatcctattacttgtttctgtaggtgcatgtggacaaaaagtgataccatactgaagactgtctaatgctatattagaggatattttggtcttttgcaaaaacagagaatgaagacagtgcaaagtgctaggcacagcactgggcattgactgttggggaataaaaggcaactggtgttcctagaggagaattagaccaagttggactttgtctactctgctactccgtcagcactcagcctcccagatagatgctcctcatggggcccatgcttagacattatggtggcccatgggaagattagctgcatctcttttgggtggcttttgtcctctaactccagagtcatgggatagaccctactgtgagttgtttattcaaaatattgagctctgcttgtggcagatactgtcataggcatagggcatacagcaatagaaaagacaggcaagatccttgttcttttttttttttttttttttttttgagacagggctcacctgtcatccaggctagagtgcagtggtgcgatctcagctcactgcaatctccagctcccaggctcaagcaatcctcctgtctcagcctcccaagtagctgggactagaggtgtgcaccaccacacctggctaatttttgtattttttgtagagatgggttataccatgttgcccaggctgatctcaaactcctggcttaagcaatccacctgcctcagcctctcaaagtgttgggattacatacgtgagccactgtgcctgccctaagatccctgttcctatggagcttatattccaggggagggacaagcaataaagtgcaagataaacaaggtaattttatagtgataaagataggataagggaggaggtcagagagtaaaccatatgtcctgctttagaggagtccacacgcccatacaaaatccagtaataggatgagatatatccaaagtttaaggcaggacatatggttcactctctgtgaggtggcctctttgagaagatgacagtagcactgggacgtgagtttgagactcagtcacatgaagatatgaagcgacactgcccagcagaaccctccacctgccgccgatgatatgtgctgtctagcatgataatcgctagtcacatgtggctgttgagcccttgaaatgtggctaacgcaactgaggagctgtgttttaaatttaatattaataatttaaatttaaatagaaaaatgtggcaaatagctatcctattgaacagtgcagatgaggggaaggacgtttcaggtagggagggcagcttgtgagaaggtactgaggatatgtcaccctgtggatccaacatgagatccctgactggaagctctggtcagtttttaaagagcaaatctggaaaatttaatgatgtttcctgcttctgttttatgggcctctggagaacctacaaaggaataacagttaaccagacaggagttaaaatccctgctcaacaaagaacctatttcctttcctaggaaggactcattccacattggctgactcacaactcttgactggtttcctctgctaatggctgtggccagcctttgtctgtgcaggatgtagccttttcggcgctgagcttgttcgttctgggaacgaatcctgcctttgttctggacttgcatcttctggtaacaagaggctggaacccctaccatggctccttcaaggtgtctctttgtattccacatacaactcctccatcatcctagggggctcagacctcatcttttctggcatagcttttctattttcctccattgcaaagatagagtagtcagccctggttttaaagagaaatcgctgtttagagagaatttcaccttgaattgccactttatgttgaaaggattaagaaagaaaaggaaagaagaaataagagaaaaagaaaaggccccaggaatgtttccagtggttttcttacatgccatatatgcattgggatctctcaggccacggaagcctctctacctcctgggcaagaattgggctatttgaagcagccactggctagtcccagcaggggcagagggaggggcaatggcagggaccggctctgtccatccagcatggatggagattcggctccagcaagattgccaggcgaaaacagagatgaggttgccaatgctggctcagtgtgctgaggattagaggaggctcagctgcagagtctgtaatcctggactagcctggatttgtcattggtttaatgatgaatctactactctctttgtacttacatagcccaagaaaaaacaatgacctagtaccaccctgaaaggtgtaagaaacaaagcaaaggcaatccaaatgttaaattggaggccacagagccaagcccacctccatggttgagcagttactctgcctccttcctttggtcttacctgactgtctgcaattagctcagtggtggtggggggcacaggggaaggctgtgagcttcaagccgtggcatgtaccaagaagctatcttgatgttgatgaccttggtccctctgatggacaagtttgagatcataaaatgagtacctgtgatgactgaacaatgtgctggcgtgttccatccccttttgcaaagaaccttcccagaacataagtgtgaaaacccacctgaatcgggtgctttggcttcatgtgtaaacgtggcagtgcttcacgaagatccctcccatgcacatgtgcattgcccttactcttagcacctggttctccaggagaggaaatcccttctcccttcttgggaaaggggctgtgttagacactttcatctgaggggttcattggaagacactataagctacatgggtcaatattagcccagctgaattccatcatcttttttttttttttttttttttttttttggagacagggtatctgttgtccaggctggagtacagtggcgtgatctcaggatctcagctcactgcaatctctgcctcctgggttcaagcaattctcctgcctcagcctctcaagtagctgggattacaggcactaaccaccacgcacggctaatttttgtatttttagtagagacgcagggtttcaacatgttggtcagactggtctcgaactcctcatcttgtgatctgcctgccttgacctcccaaagtgctgcgattacaggtgtgagccactgcacctggccaggaattcctttgtcttataaaaattatttttaattttaaaataggtatgtttattaaagaaaaattagttggccaggtgcagtggctcaggcctgtaatcccagcactttgggaggccaaggcaggcagatcatgaggtcaggagtttgagaccagcctggacaatatggtgaaacctcatctctactaaaaatacaaaaaaaaattagccagttgtggtggtgggcacctgtaatctcagctactcaggaggctgggccaggagaattgcttgaacccaggaaggtggaggttgcagtaagccaagatgatgccactgcactccagcctgggcaacaagagcaagactccatctcaaaaaaaaaaaaaaaaaagaaaagagaaaagaaaagaaaaattagcctacagccatactaccttgaatatgtctgatctcatctgatctcagaagctaagcacggtcaggcctagttagtacttgcatgggagaagctttagaaaacttacaaaaggaaagaagggaaaaaaattacctatgattctaccatctaaacacaatgattcctgttaacggtttggtatgttctccaataggatttctttcctaccagaggaaagccttttacatggctgtaactgtaatgtatatacaattttgtgcactggttttagatttaacattaaatagtaaatgaatagtaaatatcactttttaatggcagcatagtatgtccttaagttcctgtgtacttggcacttgggcgacttaagccacaaggactcagtaacggttgaaggtcacacagtgagtgggtgatgcagccagccgtagcccgagtctcccacctcccaggtgaacactcattatattcactggatctcagtctttccctgactttgtccccacacgtggggtgtataccactgccagttgcctcctccttacattattgtgttttaacaccctcttctacttccagtgagggccactataccacccgctgcaggacatgtccccggcatggaggccagattatccccgtctatcctggtaccggaagagacccatagtatcataataaataacagtattcatgggggccaggtgtgccatgtgcttctcccaacccagcttccacctcttaccttaatactagttttggagtaaaaggaaggattaactgacatggcatagtggctcatgcctgtaatcccaacactttgggaggtcgaggcctgcggatcacctgaggtcaggagttggagaccagactgaccaacatggtgaaaccccgtccctactaaaaatacaccttgtgtactgggaggtgctttagtggaaatacaaagtctttggaatccaacaaacattgtttcaaataaccacatactaggctttgacactttaggtgaggtactcagtcatttggagcttcaatgttctaatctgtaaaatggggatagtgatcttaatttgttttaagacttgtgaaaatcaagagaatgtgtgaagcaggtagcataattagccttgtgcacccagacttactgcctaccacatgttccccactccttccttgcctggcacagtgctggtatacagtaggtactcaatacatgcctacgacattgaactgaattttcatttgggatgttcagcttgtgcgtcttcatttccagattggaactggagttgtgtcccagtctctgggtaagagctaggaccatacaattagaagggcttattctaagtattggcatttattctcctgggaattgcactccaggccgtgtatgagggttccttttatttcaataatcaagctcacattcagtgtatcatgttacggagctcacaatagcagatacacagctccggctgtaccaggtgacacgtggctcctaccagaatcctgaaggtaggcacggtcctcatccttctttcctgtggctggctgtggctggcaggtttcaggtgtttgtttttaaccactgcacatcactgcttctcccacaatggcagacaggagcagagccttctatgtgggtttgggaagatgtgtgtggtggggcgcttttcaataaactcttagtctaagaaagttctgggcataatgaaagaagacagagagaggaagggccaaacctgctgattggagtagagcctggcagcttggggaaacctagtagaccatgggaaggactcaaggccagaagagaaaggcagccacggccaggctggctggttccctcaggtcaggagctgggactggcgcttttaggtgtctgtgactgagtcagcggctgaggccaacggagcctgggacagcctgtgggctgtgactaaattaggaagaaaaagcctttgggctctcctgggaggtcactggggcaggtggcccatggaagagcctctggtgggcagctagaaacaggctggtcaaacatatccgactggctttcactttggtttttcagtgcgactatagaaacgtcacacaccgggtctgaattcagtcccagcaggagggaagcccccctgatgccaggataccccaagccccatctcctccaaggggctaagttaaaataggagaatctagtaagcctcaatcactaagtcatttataagctcactggggagttttgaccttttaaaaggaatataccctattgactgttttggataggagattacagtggacaccaggcattgcaggtagacatcagcctgtcccagacaggacaaattggaatgatggttgctttgcataacctgacaatgaagtacctgtgacaacagattttgattttagaaaatcacgtgaaggttgagtttggtttgagtgtttaaggattacagtgtgagatttggaaggagaaaagtaaaaaaaagttggcaggagaacggtggctcctcggaagaaaagttacatttctaagtaatcaaactctgaatgaggccagccagggtctttagccacttcctcacagagaggggcttcttggcttttttttttttttttttttttttggtattgtactttctgcaagactggttgaaggcgttagcctgagagcacagtttctcaactgcaacactattgatatcttgggccaaataattatcttttgtggtggttgtcttgagcattgtaggattttgtcagcatccctggtctctgcccagtagatgccagttgcatcccatcacccccctcagttctgacaacaaactgtttccagcattaccctgggggccaaaatcatccccagccactgcttagagcaaaggagaactcacttttcctcctgaaaggtattgcagttaccactgggtaggtgaaatgatgggtcatctccgttcatctcctgttccacaaaaataaagaagggcaagtgtttcaggagctttgctggctgggagtcagtttgctggggttgtctgatgtagctggattgctaaggtttttaagggtatcttcaggaccaaattttcacccgtgaaaacccagagtaaaaagcaagcaagcaaacaaacaaacaaacagaccaccaccaccaccacccacagcagcaacaacaaaaaatagggaagtaaaccaggcgaggctttggaattttattaaaaatggtcagcgcgatcagacctagatcccttcttctgaagtgctctcaggagacctgtctccatagagctggcttgggtgttgatatgtgaagaggctgagaacatgtggcataaacatcgactgatattgtttgccatttacactcagcatgtgtaatgcagcaggaatggctcccggtggcatgtgactgcccttccaggcgggtatgccgtgctcaggcactgctctttctctttcgctccctccctccctcgcttgcataccccctccgctgcccctttccagactcgagagagtttgagtgaaggcttgtcatgattggcatgcagaaagctggtagaatgtcattggaattttctagggaggcacatgcgcaacacccaaaatgactccaggcttcgatagccgcaggtcagcccgtcgtgccaggcaccctggtatgtttcagaaaggtaaggttgcatgacatcatcctacctttccccagcacaagggagaaatcgaggtttatttgtttcttttttaattctccagttcaggcagcacctctaaacatgttctcggcgctgagcatttgtgcatgagtatgcgatttgtctgtgtccccaccccctccgttttaaaaaaaaattaacaaatgattcacaacggcagtttaacatgtgacctaaaacagctcctcatgaccccagtgaaatcagcgatcctaatgtcaggaagtctagatgctctttttacgctggttactaaactcttctttaaagaaaagtcgcaaggctactggaaaacagattgagttatcaccagatctgggagaatggaaggggatgcattcagaatcccaaaactttataaatgatgggcatctcttaagggtgaggtgctttgtgttaattgctggaatttggcagtgatggaaaatgaacttaaaggtgtttgaaacatctcgtatgtgttgagtgttgactcattctggaccaggaggggagtgccgtgttaaaattcatgagcaggggatatttcgccaagaaacaaggcttgagaatagcttctgagcacccctgaagtagctggaatatgaatttcagcacctcttaggtatctttaagtaaagttaagtgtttaaacaaaactattttcattgtcgccaagcaagcaagcaagtgcataaacttctgttgtgcggttcagggtacaaatttggacatggacatgatggtctgttagcagactcaagcacaaccaaacatgactcacctcatttctctatctgatgcaattacaagtagcttcaacacatgtggtagaggaatactagttttctgcttgcaagtgtgtaaaagcaaatccatactcataaaacggcatggacggggtgtcttatatcacggagattttttttttaacctcaaaaatagcttttatgcagctttgccattggtttctgccttatatacattggaatcttttctttcttgcaattctgagatgtcagaaaactgaaggggagagggttaatatgttcacacacttgcccttcccccacatgcatatgctaacagctgccatgtatgatttttgtggaatttgatatttcgaatgaaatgacttccttattttccatagtaatataataatcaattttaccacagagaactgtgtacatgtcaagccttggctgcctctaattagcaatggatggggtagctggggaaagtgctggagagcagtttcaagtaaaaaaaatcagtcttcaagctttaaccattctttctggcctcagccaaggcagttttcaatctgcttggatcgtaaccacaggtttagtttgtggtattctaagaaaatatctagaatggcacatgcaaatgtgatgaagatgggcctgtgtatctaaccgttgtgaggttgtcttttagctctactctgcagtaactttgtttttttttttgttttttgttttttgttttaattgatcattcttgggtgtttctcgcagaggggtatttggcagggtcataggacaatagtggagggaaggtcagcagataaacaagtgaacaaaggtctctggttttcctaggcagaggaccctgcggccttccgcagtgtttgtgtccctgggtacttgagattagggagtggtgatgactcttaacgagcatgctgccttcaagcatctgtttaacaaagcacatcttgcactgcccttaatccatttaaccctgagtggacacagcacatgtttcagagggcacagggttgggggtaaggtcacagatcaacaggatcacaaggcagaagaatttttcttagtacagaacaaaatgaaaagtctcccatgtctacctctttctacacagacacggcaaccatccgatttctcaatcttttccccgcctttcccctctttctattccacaaaaccgccattgtcatcatggcccgttctcaatgagctgttgggtacacctcccagacggggtggtggccgggcagaggggctcctcacttcccagtaggggcggccgggcagaggcgcccctcacctcccggacggggcggctggccgggcggggggtgacccccccacctccctcccggacggggcggctggccgggcagaggggctcctcacttcccagtaggggcggccgggcagaggcgcccctcacctcccggacggggcggctggccgggcggggggtgacccccccacctccctcccggacggggcggctgaccccccccacctccctcccggatggggtggctggccgggcggggggctgaccccccccacctccctcccagacggggcggctggccgggcgggggggctgacccccccacctccctcccggacggggtggctggccgggcagaggggctcctcacttcccagtaggggcggccgggcagaggtgcccctcacctcccggacggggcggctagccgggtggggggctgacccccccacctccctcccggacagggcggctggcctggcgggggctgacccccacctccctcccggacggggtggctgccgggcagagacgctcctcacttcccagacggggtggctgccgggcggaggggctcctcacttctcagacggggcggctgcggggcggaggggctcctcacttctcagacggggcggctgccgggcggaggggctcctcacttctcagacggggcggttgccagacggagggtctcctcgcttctcagacggggcggacgggcagagacgctcctcacctcccagacggggtcacggccgggtagaggcgctcctcacatcccagacggggtggcggggcaaaggcgctccccacatctcagacgatgggcggccgggcagagacgctcctcacttcctagatgggatggcagccgagaagaggcgctcctcacttcctagatgggatggcggcggggcagagacgctcctcactttccagactgggcagccaggcagaggggctcctcacgtcccagacgatgggtggaggttgtagccagccgagatcacgccactgcgctccagcctgggcaccattgagcactgagtgaaccagactccgtctgcaatccctgcacctcggtaggccgaggctggcggatcactcgcggttaggagctggagaccagcccggccaacacagcgaaaccccgtctccaccaaaaaaatacgaaaaccagtcaggcgtggcggcgcgcgcctgcaatcgcaggcactcggcaggctgaggcaggagaatcaggcagggaggttgcagtgagccgagatggcagcagtacagtccagcttcagctcggcatcagaggtagaccgtggaaagaggggagagggagagggagggaaagggagagggagagggagagggagaactttcttatggccacagctttgtaagatagaggcaaaagccaaaagtaatgcacatataatattctctgccttgggcgacatctgtgttgtgttggctgtagtcagaaagatatgtgtcttaaggcaccagaaacttccacccattttgggaaagggatatttttctcaataaatagttatatggcttatttataaagccccaatcttaatgttctcatttaatctaaggagtgtaaaggaattaaactgtgcacattcccaaaacacacacggaaacatataccatgtccttcacaaggaaacagggtattctggtaagatctacattcccacatgcttaagacagtcataatttcaagtcagttgaaccagtatttgttcagtgcctctaatttgcccagtgttgagccacataggcacttgggagtttgaaagattctaggatgtggatgatgtcctcaaggtgcttataattagaaggcaaaactcctcccctagcaaacctcacctggcattctgcagcagaaactgtatgtgttctctgggggaaatcttgttgcaaaaaatatttatcgatttgcatgaaaaggtgccaatagagctaagaaatatttttagctgtattgtgtttgaccctttgtggacttgtgaccctttgtggacttgtagaaatttcagtgtttattcttcagggtcatttaagacaaatggtcatgctgtttggagtgacaaaaatggcttgtgggacccaaagtaataaagaacagattgattctattcttttatagattggtaattcttagactttgctgcacaattgttctcctggggagctattaatattacaaattccagtgcctgggttgagtcaatctctggaggtgggactcaagccccagttctttttaaaacttcccaagtaattcctaagtgccaccaagtttgagatctagtgatacagatgactttatcaacaaccttttttttgttgttgtttatttgtttgttttagcctaagccttctagggtgagttttggaatgggctttttataatgatgggggtgggtgttgactaaagaactttcagctttctggaagctcaccctctgttctctgtactagtgaactcagtgtagatggaggtatgctttctccctttccaacaaacctggtaatatgatgccaagccagtcactcaaccatctatgttacctaaggttccctgaaccttgagtgtttttattacagcagcccaaatgttctgaaaatcttgattatgtctcttaagggaaggtagttttataattaattacatgtgtcccttgaaattatttttacattgtctgaaacccccatggaagaggaagcccattcttggtgtacttgcagctagtagaagtagctcattaaaatacaggggttactcaattcctgataactcactatagattttttttttttcagacagggtcttgctcactcacccaggctggagtgcagtgttggtatcatagctcactgtaacctcaaaacccagggctcaagtgatcgtcccacctgagcctcccaagtagctgagattacagttgtgcgccaccatgcctggccaatctaaaaaatttttttagagacagaatctctctatgttgcccaggctgttctcgaattcctggcctcaagtgatccttctgctgtggcctcccaaagtgttaggattacaggtgtgaggccactacccccagccacctcactatacattcttagggttggaaagtattttcaaaatactctagtacagcggttctcaaggtgcagcatcagcctcacctggacttgttagaaatgtacatgttcacgctccacccccagatcttccgagtcagacacagagatgagggtgtaggtggtggtgaggggtgggcccagcatctgtgttttaggaagttctcctctccgggtgcccaccaaaatttgaattactgctgttatttcaccttgtcagaaactgaggtaccccagtcctcagatctgtctctgcaccatggccagatcatcctaacttttctgtgtcatgaataactgccttaagaaaacacccaccatcctaaaatcataaggcataaagaaaccttaaatgttgtctcatctgaccctcccatttcacagatgagaaaactaaggtcgatagggtgacatgaagtcaataagatgtagagttattggtgacagagcttttggtctacttaaaaccgacacagtcttcctcccccactggcccacattgcctctccagttttatgtggacttctagtatttggctgaaatcacgtcagttaaaatgtctaggttaattgtcaggcaactctagaaaaagaccaacagaattttaattctttaaaattaatccaaaattctttcatttcaaattggcttgaattttataactgtctttgtacatttaatagaaaaaaatatcggtgatgtaaactgctgaaaagaaaattcacagaacatggggaccagtcctggaacataggtttcatcccaacatcgtgtagattaggcacttaacagcgcctcagaggcacacactgaaattgcattttcttccgatttggttaaaaggaaaaacgtgacaagaagtctgtttgttgaatactttacaattttatacttgatgtggttagtgatatttacataattttgtccgtgttcaaagactgaatctaatccacattctctgtagagcttcatctttcaaagcattgtagcaatacacagggaacattaagccaagaaaacgaagggagaacacacagctattatctacatacacatatacatggagcaggcatgtccatggataaatttttttttggttttttttgtgggtttttttgagacagagtctggctctgttgcccaggctggagtgcagtggtgtgatctcagcgattctcctgcctcagcctcccgagtaggtgggactacaggcgcgcaccactatgcctggctaatttttgtattttttttagtagagaccaggtttcgccatgttggtcaggctggtctagaactcctgaccttaagtgatccgcctgcctcaccctccgaaagtgctgggattacaggcgttaagccaccatgcctagcccattgaatagaagtgtttattggttccacacacctaccatgtgctaggtattgtgatgtggtgtgggacacatatagttcctatcttcgaatgatcatgggacagtgggaaagtcagacaagtgcttcagtagacaattatgagagcaggtggtggagttagaagagagtacagttgaggctgatggagcagaagggcattctgaagatcatgaaagggacatcagtgcacactggatgggagcagaaaccagagaaggctgcctggaggaggtgtcctgtgagctacatttcaaagtatggtagatatctaggtgaaggggagtagggaggaggttgtgtagggagaggggccagtatatgccaaggcatcaatgcttgtgtgtacattttctatcactgggccaggattgatctataaatccctatgtatttctttgtgtgtataaacattagcaatttggtttcttagagaaaccaaatgctttgcatagcagttttaaaatatacatttcgaaaagctcatttttccattacaaaagactcagatgttcccaagaaaagtttctcagttgagaggtcaccagatcttatgttaccgagaaaatggaaagatttcccctaaccccagaagtcaaaccagcttcctcaatttgagactgcacaaaaccaattaatttttgcccattgtggattttcttaataattgcatctccgacaaaccaactcctgtcctaaatggatttgagccacatttcactctgaaagctgtgggtccatctgggaaatgtctttgtagatgagagaattttataataaagtatttttggtatttcatttactaaatcttcagggatataggtaagagagcctccgtgctgaactgactgcctaacagaacaaggttagagagaatgaaattatttcatgctgtctggcctgcaacacatgcctctgaacgaagccatatacagtcgcgggtcgcataatgatgttctggtcaataacagatggcatatacaatggtggtcccataagattataatactgcatttttactgtacttgtctaggtttaaacatatttagatatgcacaaatactcaccattgtgttccagttgcctccagcattcagtacaggaacatgctgtgcaagtttgtagcctaggagcaatagggtatatcatatagcctaggtgtgtatgtacactctatgatgttcgcatgacaaaattgcctaacaacacatttctcaagacatgtctctattgttaagcagcacatgactgtatatataacaatggtttctttaaaagcactcccaggagtggccaggtgcagaaatagctgaatttgtgagcaatgataatgatagttaatataattatcatattttccagagcacctgcacatcacgtttgatctttacagtgagtggaacagacattacgatctccatttgacagatgaggaaattaaaccttagagttatcagatttcaaaggtgaagggaccttagagatcctttcatccagctttctcattttacaaaaaaaagaactccctgagatccagggaaactaactgacctaggatcccacagggagtgaataagggctgttgggccaggcccaggtcttctgatttctagcttcctgattttgcactccattgcgctattctcagtcttcagtgtgttagaggaaacttggtaggttatgcatttgttcttaaggagaaattttgttgatatcagtcctaggcactattttataaatgcacacatgtggaaaaatcccttattttcctgctttttttctatatatagatacaggcagatacacagacagatagacacaccacatgtggatgtcactggggagatgaaggtgggattgaacttagcagagtctcaaagggggcttcagctttatctgtcaaatattcttttattaaaaaattttgaagcaaaatgaccattacagtagcatttattcattttggataatgggcactgaattcataagtgtttgttttcctcttcatatttctgtattttaaaattttcaaaaaaaaccaaatatggatattaaaaataaattctcacctataataccataccctcattttataaaaataaagaatattttcaaagaaataaaaatggttcagaaggatggaaagaaaactatactatgggactcgttagttaagttgacattaatcctctgctttaagtctttcctgtgatgacactagcagaatgtgtatcattttctctgcatttgctgcaggatcagttctctttggcaggttttgagccgttctaataagtccagcatgaaaggcaggcctctcgtgtcagttctaaacccaccagctgccccattgtgactgcatagtcccctggttctgagactgtgctctgcctgataagcgacgtacggagcacagtggactgaaagcccggggatctgataccaaacatgttagttaaactcatgtttaactaacccaaactcatgtttaactggcccaaaggaagtaggcccagaaatgtggtttttggagctccctttaatgaacgtgtaaacagaggatagaatattggccttacagtttaaaaaccctccttcaagtcccagtcaagtcccttattcactggatgacctcacacggttcatctgatctttcttggtctcagtcttcttactatagactggaaatggtcatatttgacttagctgtccatatggctgttctggagatgagacagctaatgaagtgagaacactcattaacacaccaactgaaaaacacaaaacaaaagagagatgataggattatattgctgttatgaatcattccaagaggtgtcatggtgatatgaatcatcatatggtaatgtcatggctaaggcccaaacacagaatagcagcattgacccagtagtctcgaaattagtcacagaggccaagctagtgaagacccagcagccctattgttatcaagaaagagcactatccaaaaggtgtgtggcctcatcttctccttgcaaagagagaattcatctggtatatgttgataggcgtgtatccgaccacagctacctccatcagccctgaggacagaggcagcctgcattccagtcccagctcttctctgtctcggtgtgtgacttaggcggtttcacagaggacgccaacttcattggcttttgcggttttttgtttgtttgttttttgttgttttctttttgtttgttttgttttgtttttgtctgtagaatgagtgagttaaactaaattgtctgtaaggcctcagctcactcttaaagtgtgatcactagctagagtttgaactttagccccaatatgactgttgtgttgtcattgtcacctttgtaacctgacattcaggaatgtccctctctagttcatattctgacctagcttctgaaagcattatagcagagttgagaatttttgatctaggaaagataaatattaaaaagaaattcccaccaaaataccataaataaggaatgttttaaagaaaaatggttcagaaggaaggaaaactataatgtagttcttgttagttaagttgacattaatcctctctttgctttaagtctctcctgtgttgacactagcagaatgtgtcataaagacatggaaagatcataaattctcaactctgctctaaagatctgaccttcagcgttgcatttatttggccacacctttatagtgtggtcatacctagaaaatattttcttgcctggtcatcagccctctcacctcgattactttctatattttagcacaaaagaagaaatggcgcattcaccactcagccagttgcactggaagtgaatttaaattcctgaactggttatcttggaagatattgtgcttattgcagatgtggccggtgcatgagtttaggcactaccatgctctgggctgtggttcttggctcctgcttctggatggctggacattaccaggagagagcctgctgatacatctacgcacattcactctactgcacttcagctgtgtccttgttattccacagccctttaagtcctggttcaccaaccagatgttaagactctcttggatccctcaaatcccatccccatgcctgctgcctcctctctcagcagttgcccactccttatcttctaatcctcttttctccctatgatgatgatagtgaccctgtagctccaactactgggtcctcacagtcagtccactcctgcagaggaaactggagggtgaccaggaaccttcaagtcaatgtgggccacagacaggaaccgtctttaaaagatggttaaatgcccgtggtttacgtaggttggctttctttaagcaaataaaggaaatgcattgcttcatgtccagcaaagtacagggtggattcaggagaagctggctcaaggcattcctaggaagtcatcaaggagctgcctgtacctctgtcttcaggccagcatcttctgagttggctttattctcaagcaggctgtcattaagtgatggcttaacaacaatttagcaaccatggcatgacagagaatcatgcctgatagctctaacaaagtatccgagagtgttcccccatgagccaatcactgttgccagagggatgtggttcttggactggccaggtctgagacacgttgcttgggcccctatttgtgcagaattggcccctgactacattcccagagggtctttggatgtttggtcagatggtctgtactctggggggatcaattcataccagcaaggtccagtcagcccctacacctaccaccgcctctctagtggaagccacttttgcatctaattgtcttgggaattgtgttggttttctattgctgctgtaacaaattgccacaaatttaatggcttataataacatacatgtattatcttacagttctggaggccataagtccaaaaccagcctcactggactacggtcaaggtgttagttccttctggaggctctaagggacaatctgtttcctggtcttttctagtttctaagaggcttcctgcatttctttggctcatggccccttcctccatcttcaaagccagcagcaaagcatcttctctcctctctgacttctgtttccatccttatatcttctcgctgactctgatcctcctgcttccgtcttagaaggactcttgtgattacattgggcataccaaattaaattcagaaattcagataatcaagatctttaattcaatcatgtctgcaaagtcccctttaccatgtaagataacatattcacagcctctgtgggttagaatgtgaacatttttattattcagcctactgcagggattatccactcaatttaaaaacctgaacttagacagagaaagagtgtactgaagctcctgcattggagtgggaaattgtagatagtgacctaggaaggtgactttgtacctgcttgtaggtttagttttatttgcttcttgggtgtatttagattgtcctttttgagctgtttgtgggtttttctccacagaattgggtactcataaaagaggtgtccatattgcctcaaagccaccagattctgatgagccataccccttatcttccttcttcattttgttcacggcaattactttgtgcccataaagtgggaggcagtgtgctgaggaaatacaagattctccaagacacactcctttctcttgtggaacttatgtctggtggagtagaaaggcacgcacgcaattatttttaacccaaggcacaggatgtgctgagtgatataaaagtgacaaactaaggagtgggaagacagcaggagacatcagttccagcttccaggggtgtcagatcatgcaccccaatttttggttcagaaatatgatcactactatatgcacctcaatttcaggttattaactattgcaggctaagaattttagggctttaaaaatagtatgatgtgttttttcttctttgtctagggtgtttggatgaaagcaggtgctcagctctgatgattcatgtgaaatcacttctactcaaggttgactaaagttgggaatgatgaaaatttcctagtcaaagcaaaaattaagaagaaaacctggttagttttcttattttttgaggaatctgaatgggttaacgtctgtaacctgggccatactctgaaaaggacaggtttcccatggctgacctgcaaatacccagcatggctggctttcctagttggaaagcccttcctcacgtgtcctttcagtggcaaaggggaatctctactaagagctccctcctgcccagaatgcaattttagaaaatagagctgacttctctgggaaaaacaaaaccaaccttgtcttactctggtcatggaaaccaacttggcacctcattatcgccttgttagcaagaacaggctgtatgatggacaaacctgggaggaagagttggccctgtgtggccacggttttgagttaagcttaattgcttttctaaagctcagctacttaatactacacaagtcaaaatctatcatcagactcttgaccatccattctcctcttccttccgtattcttgcctacatagacattggtcgctccccattctgctgctgttgaatttgtgctgggtcacccagggacccccaaggcttgtttgcaaccagcccggctccccaaaggagaacagggctgtaactacctttaactttcagtgccctcttcccccatattttaaaatgcagccagcctgttctgcccttggagcatagcagggctgctggctggggaaggtggtgtctttttaacaacttataggcaatttttgatttttcatgcaaatgggaaagaataacaaaggcattttatctggctctcaaatgtgctttgtacttacatttaaatgtgggtgtgcctgatgttctgggaactcccttccaacaagacagtgtggcaacccatgtcacttgctatgtctcccttttcctcctcagctgagctagctcccagcctctctcgtttttgttccattatcattggatttttactgtacagaacctgtgacagtggagactaaggtgtcccagttgtgcagtgtctaccctgtactgcctaagcatgcttattgtacagcatgcattgtttatggcaactccaatttccagttttccagtccccttcttcccattcaaatgtcccagaattccagttcatcaacatcctgaacatatttcctgatgacacccacttttcagaggggaatttaaaacctggaaaatgtggtcttaaccaaagattccctccctgcctgtggtaaccacatatcccagatgttctgggaaagtctttccagtttccagaccatgcacactgatttttggtccagaaaccactataaccaaccaatataggtcacatgaaagacacatgtcagacggacaccctttctgcagtaagattcggtgagagtctgctattgtcccctacctcaaattcagatttttttacttgtaattttttggttattccttatactagttaggtttgagagctcagttgaagggaactgtgatattgtgagatttggtcttcctcaggtttcctagcataaaactccaaaagtctttggaatcggataaatatctttttgtatgctaataagctgacaaatgtctggcagccccttaggtatctttaggatggggtctggttactggaaagaccacagcaggatggaagggttgggactttcagcctcacccctaacctcagggaaggagaatggggctgaaagtagagttgatcaccaatggccaatgatttaatcaaacatgcctgtgcaatgaaacctccgtaaaaacccagaaaggactgggacatgtggaggttcctggagaggggggtgcccgagaggatgtgggagctctgtaccccttcccaaacactttgccccatgcacctcttccatctggtgttcattggcatcctttgtcatatatcctttctaataaaccagtaaaactaagcatctccctcagttctgggagcctctctagcaaattagtctaattctgatttacagccagttggtcagaagcatgagtaaaacaacctggggcttgtgattgacatccaaagtggggggacagtcttgtggggctgagccatcaacctgtgggatctgacgctttccccaggtagtgtcagaactgaattggcagacacccagctggtgtccactgcagaactggttgcttgcttggtgtgtggagaaaacctcccacacatctagtgtcagaagtggttcgtgttgtgagagtataggagacgctgaatttgtttgtgcctatattcagacaggaagacaattcatgttacttttggatgtgaaatgaggacaaggatgaaaatgtgtttggcacaaatgtaaacacgattcactctgtaggcaattgttaagcctgcctttttcacttaacattagagcatatagattttctcatgtcattaaagtggttttgtttttgtttttttgtaacagagactttggcaaattcaagataatgtttaccattggcaatcacggggaagggtgaggtggggggagcacgtaaccaagggagatttatcgtattggaatgctctctgtcttaagcttggtgctgtgtactcttttttgaatgtcctaaatgttacataataaagtagaaatttgaacaccaatagtaatggttacttaatattttattatgttggtgtatcataatttcctcagttcaaatcccatctcgctattgttggatatttgtaattttcaactttggactcttaaatagtatagtattaagcatctttgggtatcaaattttgtctgcatttgagctcattttctcagttttgatttatataattgaattccagggtcaaagaatatggctataataaatgcattttgttagactatcttttaacaaagctgtatgcgttgattatcattgacattgtgcctattctactctctctccaacacggagtgccattttaaaaaattgctattttgctaggcaaatatttgttttgaatggttttagtttatgtttctacttactagtgagattgaacgttctgtcatataatttttccattggagtttttttttttttttttaatgtgtatgtgtgagcacaggtttttgcagattcacttgtatgtgggaccagtgtgggaaggtcttgtttatgtgggaggggggaccacagataacaaagaacagccccttgcccccctcattgaaaaccagctgtgcatctagacctctgtcttcccacagtgccgccaagctcctggacaagaacccattctcggtcagtaacccgaaccctctgcttccttcacctgccagtctccagctggctcaactgcaggcccagctcaccctccaccggctgaagctggcacagacagctgtcaccaacaacactgcagccgccacagtcctgaaccaagtcctctccaaagtggccatgtcccagcctctcttcaatcaactgaggcatccgtctgtgatcactggcccccacggccatgctggggttccccaacatgctgcagccatacccagtacccggtttccctctaatgcaattgccttttcaccccccagccagacacgaggccccggaccctccatgaaccttcccaaccagccacccagtgccatggtgatgcatcctttcactggggtaatgcctcagacccctggccagccagcagtcatcttgggcattggcaagactgggcctgctccagctacagcaggattctatgagtatggcaaagccagctctggccagacatatggccctgaaacagatggtcagcctggcttcctgccatcctcggcctcaacctcgggcagtgtgacctatgaagggcactacagccacacagggcaggatggtcaagctgccttttccaaagatttttacggacccaactcccaaggttcacatgtggccagcggatttccagctgagcaggctgggggcctgaaaagtgaggtcgggccactgctgcagggcacaaacagccaatgggagagcccccatggattctcgggccaaagcaagcctgatctcacagcaggtcccatgtggcctccaccccacaaccagccctatgagctgtacgaccccgaggaaccaacctcagacaggacacctccttccttcgggggtcggcttaacaacagcaaacagggttttatcggtgctgggcggagggccaaggaggaccaggcgttgctatctgtgcggcccctgcaggctcatgagctgaacgactttcacggtgtggcccccctccacttgccgcatatctgtagcatctgtgacaagaaggtgtttgatttgaaggtgagttgtccaagacaggctgggagccacagctagaagcctgggcaggcctttccccatgacccaactcacgctgccaatgggcaaggaactgttgcattggggtaacagaattttgccatcagtattcttgactaaaatcacaggtattaggacccataggaatttcagaaatgtatcaggaccagtcccttgcttgaaggtgagtcagaaattcttacacactttttctagatgagaaagctgaggctgagtaggggagcaaaggaccccacctgggttgcagagagaaggggctcaggagtttcctgccttctcgtggagggcttctcccccgtagtatgcctagaatctactgccccttgagtacccatattgtagtgagttagaaaagaaaaaaagcagaattttggatcaggggaaacagattaattcccccttgggacctagacaaattattatagagagcctcagcttccccatcagcaaaatggaggtagagtctcatgacaccttcccggtggttgggaaatgctttgagttcctgcaaacagaggtatatgatagtataatgtccccccaaaaaatgtattgcagatgcagtgaaatattttgaagcaataacaattataacaaataccatatattaaaccctttctgtgtgccagcagtaactcttatgaggtagatattattatgattttcattttacagatgagaaaactgaggcccagagagatgagatgacttactcagccccttctccccgccacctccccagcttgaaagtggcagagtggagattcaaatgtggccctgaccctttcagagcctgcaccatttaaacactgggctgtcctgcctcccatctctcatcctgtccaaaagcataataatgtccttgcagagtgtgagtcacactgcagcatgtcattcacctctgtttgggtcacaccatccaagtgcatccctgtgacccagataggacatgccctctgacctctagtcttgggaggggactagctgacacggggaggtgctcaaggattttgtctctcatgaaccttttctaaggctttgtaagtcactgtgagtctacctgccagattctcccaactggatatgaaataggtggggtcttcctgggggaaaggagaaggggtgggaggtgggaggtaggtggtgggggcaagggtccattgagaggggtagagggaatccaatttgtgagtctgggctcctgttcaagatgggcatgagatgtatggatgaggagctgatggagcaaaggctggatggggaggcaggaacagtgggaggagcctgggagggagagaggaagggtggagggatgtgtctgcaggggtggtccagcctctgggcgctctgtgctccctgcctgaccagtgtctctgtgctcatcctttgccttcccatggactcagttctactttggtcacttttctttccttctgacctaggactgggagctgcatgtgaaagggaagctgcacgctcagaaatgcctggtcttctctgaaaagtaagtgctgttcaggaggacaggctcatgcgtaggctcaacacatattcactgagcatttactgtgtgtcacacgctgttttgagtcctggggcaatagcagagaccagaacaggcaaagttcctgccctcaaggagcttgtgcttcacaggggccagggagatgataaacaaaatgaacaagaaaattacagcatccctggtggtaaatgctaggcagaaaacaccaggcagaggccggaagtgcgtgtgtgcgtgggcgtgtgcctcccttttctggctttcatttttttcattgtagtcaagttcacatagggcttactattttaaatactttgaaaatactttgaagtatacaattcagtggcatttagcacattcacgacattgtgcaaatgttaccactctctagttccggaatattttcattactccaaaaggaaacctcatactcattaagtaatcactccctattccccctaagccagcccctggcaaccaccaatctgccttctgtctctacggatttgcctgttctgtacttttctgtaaatggaatcatatgatatgtggcctttggtgactggctttttcttttttacttagcataacattttcaaggtacatccatccatgttgtaatatgtacaacctttctatgactgaacaatattctattgcatgtatatatcacattcttgtttatccattcatcttttgatggacatttggattgtttccaccttttgactattgtgaatagggctgctaggaaggtttggggacagtttttgtttgaacacctgttttcaactatttgggggtctgcacctacgagtggaatttctgggtcacatgctaattctttgtttaacttattaaggagccggtttccctttctcgccctctccagtgctggcatccggtgtatacttggttcggcagagggaacattgtgtgcttctcccaacagcacagctgtttataaccctgctgggaatgaaggtgagcaaggccctacaggtcagcagcttgaagcagaagtgggctacccacaggcacattatgtcctgtctttaataaccaggacttccctgatgtccccttctcacggatgtagaaagcaaacagatcccaagacactaaaatgcattgggcctgctgtctgggcccatcagtattctctgagatacttgagacgtaaagctttgctgattatcagcatgtccagaggtacaatcatgccaatcactaataatatgtgaaggggaaaggttcagttttctatgcctgcttatgtcctaataatgacttttgatgttacattctgggttttcactgactttgtgtaattcatcatttagattatgcctcaaatcttggaacatcatacgtgcccattccagcaaggtcattcactcagtcaagccccacatttcctttggcttctgtggggacaactgtgagtacggaaacattttctctagaaattaatgaaaatgattattagtttatttatttgtttgtttatttgagacagccaggctggaatgcaatggtgcaatcatatctcactgcagccttgaactaactcctggtcccaagtgatcttcctgcctcggtcaaccaaagtgctggaattacaggtggccaaagtgctaggattacaggtgtgagccaccatgccctgcctcaaatacctctctgtgtgccagtcaccctgaaatgcttgttgctttccccagcactgtgttcttcatgctcagtatgcacctgacatgccacaggctgggaggatgttaacactttttttagtggagagttggctggcttttgaggtctagacccatttatacctggtacccttcaattttccactctgggaattacacttctctagtttccaagatgacatgaccagaagtgaggtgagcatgtgactcaggcagccaaggagatcatcacactttctggccatagattggttcatgaatggtgtatgcctgtagtcgcagctacttgggaggctgaggcaagagaatcacttgaacccgggaggcaaaggttgcagtgagccgagatcgcaccactgcactccagcgcaggtgacagaccgggactctgtctcaaaacaaacaaacaaaaaaaccattttctccattgtcattgttgttgtcaagcgtttgtagtatcacctgctatatctgggcctagaggtgctgacctggctttgtgtcattcagaaaaacaaccccagacagaagtgaagagctgtttaatccagttcatctagtattgaaacacatgacttaagaagcagacataaatccttaaaattcaaggcattcctggactttctagcattcagcgctggcttagaaaaaaaaaagttggagctttttatgtttttttaagactatttaatgttttatggaagtagattatttcctatgagagggtaattttgaagcttgaaccagaaagtgtgtgaaagtaaggactacgcaccagtagcatttgttggccccttgaggaactggtttgtgctgtatgatgtttttgtttgtttttagttttgctgtctctgcaacatacattttcgtcctccaaagctcctaagcttcatctctcctttttcaccaacggtgacagctcctcttctctctggggtttcagttgttttgtgccaccaccctacacccccatctgacctcttcttctcctctgggcaggagaaaggggagtgggaggaaaactgactgtaaaacaaatgcatttgtctgaaccctgctggagggcacctgtttgtgtgccttagcctgtgcctgtgcttttgtggtgtgagttgctgcagcctctttctctcttctcctgcgagtgaacacaagctcacaagagcatgtctccacgtgctgtcccctctacgtgttggcattgcaaagcatcaggccagtaagctgtgaagtgcagctctcaggctctgaggagtgagtaagcggaaaagcgaggtggttcatgatgagacgtgaggcctgcctgagcccaggcttctgtttatttgtgtgtgttgatctgtgatgttgaataggagaagcgcttcgagagagcccctgtctggaagcccacattttggtgaaagagaattttgtggtttccctctctgcactctgctcgctcagagccatgcccaggtcaatggcagcttcgggtcagtcccaggagactgcaatggctagattcagtgaggcctgtcctctgaggtcagattcctggtaacatgaccttgtgtcctgatgggggtgtgggccatggaggcacctctgtgctcacaaccctgccctgagaccccactccaggcactgaaggggaggaactgtgaccacgatgggggaggctggattgagtgtcaggtgggcagggggcagggcttgtaaattgactccaacctggggtctgggtacggggaagagatggcattaactgagcccctccataaaggggggtggatggggagaggagagacacaggcaggacattctgcagtctgtcccaggcctcttccccaccctccagcgctgcccattgagccagagaccctttcctatggacttggctctagggacctaagttcaagtcctactttgggagccacttgctgtgtgtctccaggcaagtcactttacttctctgaggctctgtttccttaagtgggaacaataatgcctttggaagataaagtaaacaactggatttccatccagcttgtgtaatttattgttttgattattcctcgaatctcagaacatcccatgcagctctgcagcccaggcttctggttcagtggccagcgccagacagtgggagcaaggcttgggatagatccagtattgtcctgcccttgtgaggatcagatgagataatatcagggacaatgatttgggaaccgtcaagtacatatgaagtaaccatggctgttcttgagtaacgagcgcttttaacccattttggctgtgaagagtcggggggaaacccatgctgtctaaggctggctctgtctgctggccataggattttgtccgagtcttggtatcagtgttccccttacacaaatctgtctagtaatacccagggtcacacttgctccaccttagagatgttttgaggttcccatggatgtacttttaaattacgtaccagtgggcaagcacaagctatctgatgatttgtgtgttgattctaattaattcctcgaagctctgagtgccacttcctccgaacacctagagatggggagtttatctggcttgagcctggtgagaagcaacgcaggaaacattttgctaggagctaggaggggacagagacctaggggacagctctctgcgaggagctaggaggggacagagagctaacattttgggagctaggaggggacagagagccccagtcattgtaggatgataataaaaacaacagccaacatttatatagtactcaatatgttcttagcatttttgttttgtattagctcatttagtcctctagacaaccccatgaggtggatactattattatccttattgtacagttgggaaactgaggcctagagaagcttagtaccttatatgaggccacatagctggtaaatggaggtggtgggatttgaacctaggcagcctagctctggaagcctcatttgtaaccactaagccctgcagcctctctgcgaggatctgaggggtctcttccttgctgtgatcctcctctttagtaagcccctctcacctccccctctccctaccccacaagccgcttgggaggttctgaggctgcgttgcaggtgacagggacttctctggccttggccacccatggagcaagatgaagaggccagccacacctggtatccacattcttctgcaccctgacagcatctgccaagatgaactcagatgtttggaggccttttctacagacccagtggaaggggagagtcagcatttgtctggttttatcattataacctctgtgacatcttgctggtcacatgagcctcctcaagcctatctgagggacaaggacaaagcctgccccagccaacccctacattgtcagtggcttgatgttcattcacatccttctgtcagacgctggtcccccggtttgccattgccagcatatggaattgaatgcaggtgtatctgtcttgaggaaaacctgaaatgcgagaacattgacatttgaagacaagctgagaaatggagaaatgattaatccactcttgaaaaatactttgcaagtctcctttaagtagcagaagagtccctcagagaaactattgactttctttctgcctacaaacactgacctccaaagatatcaccccaaagataaggggtgattactctgttgccaaaggatatttttccagtttccaatgaatgcccagtgagttgtttttgcatatacatttctaatgtttttctgcttacaaaacttatgcttattgtgaaaatgcaaacagaaaagaaatactgaggggaatgaaattccccggttgtctccctttcagccctcacagagatcccattttcctccacaagtgaggtctggtcctgcgccagcactttgtatgtctgattccatttacatgcatcttttcagaaacacttttttttgagtaaaaccaggaacagccaggatcctgccactgtctgatcatatcactaatgtctgtggagcgaagagcagttactgcctctaaagctccctgtttttaagcaagagaagaccaaagtgacacggagctctggaaatgagccttcagattatatccgaactgccacaaaatctaaaaggaccgcaaagaccatctgccactgccaccaagcccttctggggacagacttggctgcatttaaacttctcccacctgtgttggagtctgagtgtttcgttgccttgtttgtttatttatttttgtttaggttttttttttctcattttcttttcttttcctttttattgttatttatttatttatttatcgagacagggtctcgctgtgtcacccaggctggagtgcagtggcatgatcatggcttactgtaatctccacctcctgggctcaagcgatcctcctaccttagcctccaagtaactgggactacaggcatgtgccaccagactcagctaatttttggagagacagggtgtcgccatgttgcccaggctcgcgtgtttatatttgacagagacgggacactgcactgacagttgtatgctgtgtttgctgttggtagggtgatttgtgtctgtcctcagcccctcccatcccactctagggtccccagagataggtgttcactttcacttaagctcctgccatttgaggccaggcactttctccttggctgactgagtcgtcataaacagagtaatcaggtttctggaaggggccttggggctttctcagcctgttagtagtttttgtgtacctgcccgaggtgcactttctctgtgtctgtccctgtaaagccaccttgcagttttcacaaccatcttggagtttatttagtgccagtgtcacagatgggccaccctgacctgggatgatacacatcgtttttattatttatttctcgccaagaccctgcacattggggaacttgtataaataaggaaatggaggctcaggaaaatagaaatgtctgtggaaggccagaggtgtaagtcacaggctgcaactctgattactggctgtttctggaacaccatctgtctgccctggccctctgaatgcatggcttagagcgctctggtctcctgacttctttgagcatgaggactagtaattgatgtggcatatactaccagccgcctccccaccattccagctctgtcattgctcctgtccctccagcaagggccaccttgtgctttttcaaagagagcaaagaggaggagacaggagacctgggtaggttttgttttggaatttgttctttttacaaatcttactttttcttgttggaaaagcagtgtgaacattgtgtaaacaatcttagcagtaacagaaatataaaagaaaagtcaactttgcagagaaaacagaagttaaatgcttttgttataagtatatatctctctagctagtgtatgtgtacatgtttcattagtaaaagtaattttttgggcacaaaccagataacgtcatacaatctgttacacaatttgtttttttcacttaacataagctttcaatatatatttaaatcgatttctagacatctttccacatcagaacgtaaatagttcctatcttattgtgtaacttcatttttgtatttaccttaatttatcaagtctgcgattgataggttttttttcagtgacacctgagttttaatcacaaatctgccactgtttaattggccacagattaagatccttaacttctctgaggcttcagtgtcctcatatacagcgtggaccagatgacctcccaattttaacgttttgtgactctacagtttccagggatgttgaagctgctaaacaggtgaatcgtccaagatccgtaggcaatcctatggatttaccagtaaaagtaaattcactctgagtcagagctaatatgctctataaaatatttgaaagcatcaataaaggcaactgtgtctaccctccaagttaagccaagatccatagctacggaatttgcaaccatttgctatctgcatgataggttcaaaatcaacatcttgctctctgcataacaggttataaatcaacatcatgagagataaatatttgccatatctgctcttaggcatgtttagaacaaaaccagcagaggcccacagactctgtgccagataacattagatcacatctgagacagatcaggctggagcacagaaatcgtttactgaagatggaatctacactttgcagctctaggaggcagtttgagagacctctctcaccctgcaggcctgttgccctaagccatatttttacggcaactctaagttatttgaacttgagcctcttatttgaactcgggcctcttatttgaactcatctgtgaaggctatttctacctgcaccaaggggcaatgaaaggtcttagaatcttcatatacaagtctgtttgcttcttttgcatttctccccagctacaaaagagttgagggtcagttgagaggtctgggacccagccatatgaacgatcaggagcaccatctggttttaaaggtgcagcccccgcatgtgaaaatgcacagcccaggcccccgatcccatgtgggggcactcaaggtcagtgctggcttgcaggcaggctaaagcctccctgaggctgaaaaaggatgattgtccctttagcttggtaattcaggctttagtcacacccctgcaacttagctctcttagagatgtgacctctgctggaaagttttcagtgcacctgtcttacgtgtggctccttggcactcagcagacagagcccatcaacaccttgacctgcccttctcccctacagtatgtcttttaaaatttatttttggtaacttttaatatatttcaaacttacagaaaagttaccaaaaaggtataaggaactcccatataacttttgtccagattaatttcactactcctttatattttgccccatttgctttgtcattttctctatcttcctctatctgtctatctatctatctatctatctatctatctatctatctatctatctatgtatccatcatttgatcagctgtgcattttcccctaaatcattatttttagagtaggttggtgacattgtacctcttcacttctttttcagcatgaatttcctaagaatacagactttctcttacataatcacaacaatattttttcccaatgcagaatcattgtaacacatcctttaactgttgggtggaggaaggagataaacattatttacaggagcctgcataatgccaggcattgccccaaagcaccgtacattcacggtggcatttcatcttctcagcagtcctgtggaatcaatttttattacccctgttttacagacaagccaacttgggcttggagaaattcagtaactggcccacagttagtcacagagggagcagacacagactcaggtctgtctgattctcccactgccctgaccctggtgcctggtgactataaaacacacacttgacatgagtctgttctcagagaggccccaggcccaggtgtctgtagttcatttgtgtatcctctcaactctttctagccaccgtggcagcagaattattcatggagctgcaggattcataaacaaggtgctcactgcttggagcttatctttagtcctataaagatgagactaccaccaacacagacaaacatgtctgaaagatgaacatgcttgggaatggatgcatggttaaacagccaattacacagagagagaggacaaacattacattcattggaacagggagtgggaaagacatgggtttcctgtttatactgagcacagttggagaaagctatcattatcctggttcttggggtttagcttgtcaaggcatctgggaggagtggaattttagaacttagagccacataagcatatatattttttacatccggaaaggactttagacctataggtcatctccctcgttccagacgtggggaaactaaggctcagaaaaggaaactagtttgtctctgtcatgcacctaatcagcggctgagctggggattgaacccaggccctctgtcttctaggaggatgctctttccactggaaagtcccaagctttttatagctcaagtcgcctttcattatttacttccaccccaagcagccactgtcccgcatcttcatatttggaaagattttatctgccaaagtacttgtattaatgagtaactaactggtgacccatttttattaatcaaagacagagacacaccaattagactttctgattagcctaagagctaaccagtgttaaaagacaaattgtaaatgaattaaatttaacagagtttaatttaattgggcagccctcagaaccggaagaggttcagagagctccgctgcaccacgtgggcaggcagcatttatgggcagaaaactgaagccagatacagaaacagcttgataggttacatctccgtatttgcctaatttgaacatggtctgatcgttggctgcctgtgattaactgaagcttggctgctgtgattggctgagactcagctatttgttagaaaagtacactacttcaggctttcacctaggtgatgtgctaagttaaaatgcagttccttacataagaactcaaagtatggaggcatcctcaggccaaattgaatttaacaccacattaccatattgataaagaaattcaaagtacgatctcaactcgcatttttcaatgtaaagaataatgtttagccccctgcttcctgtggtattattacctttgaagacctttaagggcttataagagagcccgggttgggaattactgcgtagcatggtgacgcttgctcaagagcactcaggattgccggtgcccctgatgtacaaactgtacttttgatgtaccactcagggacctcactccgcctgtttcccttctcactttcctccttcgctccctccctttttccctcatgattcagatctcccacagggcatagggcaaataatagccatgtttatgtaaagtgtaatgagaatagaatagagtgaaaacagctactattctacatcttgtatgaatcatatatggttttgaacctaaatggagttcaacaacaacccaaagatatttcagatcaatggcagaaaagaatttgatgaaccatcctaaataaaatattggcaaaagaatagaacacataaaaattaatttatctttctaactggataggatttaccacatgccctgaagccagacaccacacaaaagcaaactattaacctagagattctcaagattttcatttcatggctcacttagaaaataatctgctgaagtaaatggtttaactgaagaagctactcatgatcactggaggaacttggccttcagcctgagggatcaatatcttggcactcctataaccatttgcagttgatgtagctcataattggaaagctccaaattactattatctggaagaatactaaaaatctcattagtgtcttaataaatgacaacaagggaattggtaaaatccagcatctgtttctgattaaaatcttggaagagaaagaactcagaagatgtctttttaaaatttgactggaaattttaattgagacccattcacttagtgcctttggtaacgacatcttcagcatgaatgcttctcttctttggtgactggcagctgcgaggttgttttttctactacccagcagcagcagttgctgtgctatgttccaataaaagcctcttgagttgtcctttcagtctggaggagacaatgagagaggcactggccctcatgcctgttcactaggcaactggataggccaggagcaggataggcctggaactgccttgggtgtctgctccattgtccaagcacacattagcacaggccaaccacagcaaagtcacatggggcagaaacgtgcctcgctaagagaccaggcagagcacctagcctcagccgtccttgtgataagctcagaggaccagccactctaccctgcttgaaagctcagctgtgtctgcatctttaagtgaacactcacactaatgggaggcaaagattctgcttcttaatagcactcctcctttcgtttctgcagaagggttcagtcctcactagccaggctcagactcaaagtctcctagctgatggagagtccatttgcactttaggaagatgaggagctgctctgggagctgcctgaatccttgctcccctttgggaaagtgcttgacctctggacattgcagagtgggaggtcggaaagaggcacttgggcttcaacaattcagggctgaaccataaaaggaaattcttattgactgtaattgttttcagctcaaatgagacaaatgagggcttttcatggtagaattacccaagtattagcccttgttaggggtgacatcttagactttccccctgtattaccttagcagagtcggccccacatcaaatgtaattagatgtagaagttcagtttaacatagaaaattgtgattatgcaaatggagactatgctattagaatgtgtttcaggttcggaaaattatatccttctcttccacattgggttggcttatggttactaattcttgaccctcccagagattccaggctgattaaggtttgcacaaaacagacagacacacttcctccctccaggagctttgattagggccaaatgttggcttccaaactgtgttccttagaggtgcctttgagactgccaggtgggggtcgtgccagggtgccggaccccaaggtttgaccagaatagctcctcttttatttgttgaatacattgggataaaccagttttgtttgaagaaaggactccaagctaaaaatatttcgaaaaccactgccctaaaccacaggtttttgctgtgaatatcaatgcatatgtattagattcccacaaactttctatgttcttttttctttattggaattgtaagtcaaacaacatgaggtatatatgaagaaggttcagcatgtctcatcttactgccttcccattctgcttctctgaagataaccagcattgacaggttgatatatatgctgcacatctttgtctgtatgtgctgatattctttaagcattttttattgcaaaaatttttaaacatacggaacagtagagaccagtataattaatccttgtatacccatcacccaattccaataattatcaaaattttacaacacttgcttcatctgtcttttttcatatatttttgttttccaaaaatggcattatagtacacataccacttggtaacctgcttttaacttaacaatctgtcttaaaaagtatttcatatcaccaaggtgagagaatcacttgaggtcaggatttcaagactagcctgggcaatacagcaagaccctgtttatacaaaaaataaaaattaaaaaatcagctgggtgtgatggctcaagccatcaatagtcccagctattcgggaggctgagtcgggaggatggcttgagcccaggagttcaaggctgcagtgagctatgattgtgccactgcattctagtctgagtggtacaggaagactctgacttcttaaaaaaaattattctatatcagcacatttacctccttcttgtcatggctatgtagttttcaattttatgattgagccatcctttactcaaacatttccctattgttggacattcaggctgttcccccaattttttgccacctaataaattactgtaataaatgttcttgcacatgagccatcacatattggggtgctattatttctataggatacatttctaagagtggaatggcaggatcatgggctctgtatactttgttttatttaatattgctaaagtatattctcaaaagtttacagatactcaacctcccactagcaacatatggatatgtgcatttcctcatatcctccacagccctcgttgttactgcttataaaaaacattattatgaaatggtggtgcatgcctgtggtcccagctacttgggaggctgagatgggagaatcacttgagtctggaagtcaaggctgcagtaagccgtgtttgcaccactgcgctctagcctgggtgatgggagtgagacccggtctcaaaaatatatatatatataatgaatccttttgtaaagagatagaataaaattgatattttatgtgtgtctgtgaatggattttttctgcattaattttgtaaattatagttttacaatcattgtttaggggaaagatagccattaagaacgtctggaagagaggggaaaagggaaccgtcttctgaataccactaatgatctttgttcccattagtttgcacagcggaaaggggctggccgtgtggtgcacatctgcaatctccctgaaggaagctgcactgagaatgacgtcattaacctggggctgccctttggaaaggtcactaattacatcctcatgaagtcgactaatcaggtaggtctgggtactttcactccagtgtatatgccacagaccacacattagtgaaagggaacgatataatttttgaaagaagccattcttaacataaagaggcgatgccgtagctggccttctgttggcatggcgtaggtgtttttgctggtgatgtttttttgtttcccctagtttcactctaaccttctagtgataggtacaggcctttgtgaattgcctagaggtgagaggagatgctttggaatgaggtgctcattcacatagaaagggtaattggcacccaaaataaaaatctatggacttgaatctcttcactgtgttgtcaacccccctgagctaattataatcttatcctctaagcctctcctatctgatggcctggatttggagccagccaagaacttgggactaggtatttttcctggtccttgatgtcagcaggtgaggccctttgtctcacagcaggagagtaggagtgtgagaatggatggatgcttactaagtctaaggaactaagaatccttaacctgtaggagttgactgagccctttgggatggagtacctttgtcttcatttctaaagtcaggtggggagtttatactcccaacagtcagaaatcagaatattttatcttttaatgaatatttttactttatgaatcggaggaacaggcataggaaaaattcttttcttaaagaaggctgaactttggagactcatagccacatcaggtcattaagctatctctctccatcaacctggagtgagactactcacttgtctctgttcctacttctcagaaattctattttgggtaaatgcacagaattcagcttgtaacattgatgtggtgagagtccctagattagtattattcccatttgacaagtgagagctagaggtgctaaagtgtttatcaagaaaaaggcactgagaaagctgggtggcagaatgtgaaataaaaccctaaagaatcttgacttcttagtcgcccacgctaatgccatagactatgacagcatggagaaaagctgtgcatctgaaattcagaaataaatatgagagaaggaagagaatgagcttgtttagatcatttagtttaaggaaatgagagagtcaggggctcacagtgagggcttccctgtcaccgaccccttttcccctgcagcattgaggaatcaggatcagtatattgtcagtatagtacaaaccaaacaaatccaaaaaacaatagcagcaacaaattcaccacaccaactactggggtaaactgatgcacagtcaaaacggtctctttggaactctcagtagacacaggtttagtggaaaagcccatttgtctgtgttttatcagagcagttaaataaagaagaaagatgctgtggaaacataatcgggaagttttcctttttctttaactcacaacaacatggccttccttcaagcctaggggtttgtgagttcctgaatttttttataaggaaagtagaactcaaataaccaaagcttgtgtctcttgctgtcaccatcaccaccagagagcaagttttatagggatcagctcaaggccacatatgcaactgcccctccagggaaatgtgggttagtgggctcttccatctcagaggtattccatggcatgatgtagcccaggacagacatacataattaataacaatgtctggtaaccctggggatcaggaaagggccatcttataatgagctcttttggtgatgtttataaaaaggtctctttgaacagatgggatcaaagagatctcttccttgtgctgactttttttccttttaagtgaggtataaaacacatactctacagtgcataatgtacactcatcctaagtgtacaattccattaatcggttacatgtgtacacccatataattaacacccaggtaaagatatagagcatttccagaatgtcaggtttccttatgcttcttctccatcagttccccatccccacctgagagagaagctcaatgctaactcctgtcaccgttgattagttttgcctgttcttgaacttcatagacgtggaatcatgccttgtgctgaatcttgtttaagaccattaaagtcaagtccagtgagtgtccttcctttctttcttaggcctttttagagatggcttacacagaagctgcacaggccatggtccagtattatcaagaaaaatctgctgtgatcaatggtgagaagttgctcattcggatgtccaagagatacaaggaattgcagctcaaggtaaagcattatcttgctcattcagtcattcaacaagcaccagatgagtttctcctccgtgttaggcactgacctaaacgctggtggaaaggagaggataggaaaagattcagaaattacacactgcctttgaggatctcgaggcaaaccattgcagcatggcaagaaaagtgctcttgaggtaaatacaaagtgcaaagagacgcctgagactacctgggagccaaggaaagttttccagaagaagatgttcacaggggaacttttaaaggaggaagtcagaagggaaaggtgctgagagttccaggcataaacccttgaatacaaccttctctccctatacagaccttcagtaacattttcttcttctgtcacccccttgatctcttgttctcttctctctccttcatatttacgtcttaagcctcatagaagtccttctaagcagcccttggctgaattggccactgtcagaactcagggatgcattcaaatagttccaaaccagggtttgcttttgttttagctgatctacgtttctttcttttctttccttcttttttgttttattgtgaagtataacagaacacacagaaaaatggctgattatatattgtatggtttaaaaagtaataatgggtgagatctcacaaatcccgtaaaaccaccaccaaagtcaagaaatagaatatggacagcatccagaagctcccgtgagtccctcctcctgttcaacccctccctctctactctcctgacttcaatgataatcatatctgtgcttttccttatagttctatcacctgtatatgcctccctaaacattatggtttagttttgcctgtttttgaactttatataaatggaattatgctgtgttcttacagatcttgcttctttcattcaacatgatgccatccatgttgttgggcatgtctatttattttcattgttatatacatttccattgtatggctatacagtttatccattctactgttgatggacatttgagttgttttagggacaaggctaatctgaaccttctcaaacatgtcatcctggtatatatgcacttgagcatataactagaggtacatacataactaagattgagatagctgcatcataaggcatgcttacctcaactttcctagatgatagcaagctctttccaaaattagttgtctcaaatttatactcctactagtagtgtattagagttttcggccgggcgtggtggctcacccctgtaatcccagcactttgggagaccaaggtgggtggatcacgaggtcaggggttcaagagcagcctggccaacatggtgaaaccccgtctctactaaaaatacaaaaattagccaggcgtggtggcaggcgcctgtaatctcagctactcgggaggctgaggcaggagaatcgctttaacctgggaggcagaggttgcagtgagccaagattgtgccactgcactctagcctgggcaacaaaagtgaaactccgtctcaaaaaaaaaaaaaaagttttcaatggtccacattcttgctaacacattgtcttgtccaacttttaaatttttgcctgtcgtgggagagtatcatggtttatcacagttttgttttgttttgtttttgagacggagtcttgctctgtcaccaggctggagcgcagtggtgcaattttggctcactgcaatctccacctcccaggttcaagcaattctccttccccacctcccgagtagctgggactacaggcacacaccaccatgcctggctactttttttttttttttttttgtattttaatagagacagggtttcgccatattggccaggatggtctcaatatcctgaccttatgatctgcccgcctcagcctcccaaagtgctgggattacaagcgtgaaccaccgtgcctggccagtttatcacagttttatattttattcccctaattgcgcatggagattgagcactttttcatctgtttgttggctgttccatctggatcttctctgatgggctgtttcttttcaggtcatctgcccatgcttttcttttgcattgtgtcttcttattggtttgcaggagttctcttaactggagcacgtagtctatttggatttcttgtaattaatgctgtattagtgtttgaatctaccctcttattttgtgctttctactgttccatttaatagggattttcccgttcactttagctcattccacattgacttagggtccattttgtctaagacccacaggccttaatccaccttcaaggttgaagttagaagacaaaggcttagtggatgtttctggctaggactggcattctgacaagtctccatatgtagatgggcactgtgtcaaccagcttccagagtcctgaatctgctttgcttgcatcattgcctctgaaattcctttactaacagttctccttcaggcagaacctggcttttttttttttttttttcctaataaaagtatattgcttctttcagacaagtaagcatcccaccccattctatatccaaccaaagttcctggtctcctggattcttccctgggggctggaattgaatttctacactaagttcccagtagagctttggtctccaaatgagatgttgtcataagtttctaattaggattaacggcagtaattggcttcttaaattaaagtaccaaagcatagcaataccttcctgagggagatagtttggggtggtgcaaaaaacatgggttaaagaggtcagatggtcgagttttgctttcagcaaatgtgcactgagtgctcaccgtgggtggaactgggccaggtgccatggagggagaagtagcaagctggcgaggagctcagtctggtgggagaaaaagcaaataaacaaagaaccactgacaaccatgtgacctatcctagattggaagatggtgatgtcagcctgggctctaccgcttcctgctttagtgagcttagaaaagttgcttaacctctgtgaacctcagtttacagatcaggaaaggactatactttgagttatttggctttaagtattttttttcatacattatcttttcagtctcgtaatcactgtaccctgtgaagtgtgtagggtgtataatagcagtaattataagagtacaacaataacaataatgtatacctttaattgagtcccggtactctggggcaaagaagtttacatacattatttaatcctgacatcagtcctgttagacaggtattattatctcagttttacagatgaggaatctgaagctaatagaaattcaggaacttgcccaggattgtacttagctactggaagagctatgattaaaacttagtgctgttttggttttgcactaaagctgcattgttatagtgtgttatcatgatctctgttgtctatgtgaaaaaaacctgagaaatcaggtaatttgcttatagtcacccagccaagaagccgcagagatagtattctaacagagcttctcaagcttcagtgtgcatacagatcacttggtgatgttgtgaaaactcactttgattcagcatatctagggtagtgctgttattgcgtatttctaacgaggtcccaggagatgctgctgctggtggtcctcggagaacactttgaatagaaagggcgcagaacacattattttctgatctttagcagggcttttctgctccccaagctgccatattccctcttaaggcattgtgaaggtcgcatggaataacagatgtgaaaacaacttaatgtatgtctcaactacatagtaatgcatgctttatggtccctatgttgatatgaatcagctgccactctgtctgcacgtaacagaaattcatctccattaagcctgttggcttaagcaaaaaaaaaaaaaaaaaaaaaaaaaaagaatttatggatgcatgtaaatgaaacgtccaggagtagatctggctgcaggtgcggctggattcaggacccagagaccctcattaggacttggtttctctccacgctgccttctgctcttttggctttgtttactgggggctccctgggatgggccgtagcagcccaggctctctcctctaggtggcatgatggctacagtgacctcagcagctctttctcccccttccctttccttcaacaagagaaagccagagttttttcctagaagctcccacaaaagtcctgagacttttgagagagagtcgctctgactggactagcttagcacaggtgcacattcctgaattgatctctggccagggctaggccatgctgtgattggctggacctgtgtcatctgctacatcctcagagctgggacagagacccacctagagctctggagcaagatgagggaggaacagctgctatcaggaggagggagagtggctaccgggaaggtagagggcaaacactgtatccatgtgtgtctctgggccaaaggggctgcatatgaggtcccaccagggtttgcagaggtggggagaaattctgattgctctttctcctctaactttatcttttgctcaccaggtaaagtatagggagagaagggagagattttaaggtatttttcatttcctctcttgaatatttcttcatgcacatatcttatctccccatatacttcctgtggcaagggagttcctcagcttatttgaggcagaacctttcacatgatagatgtttaataaatatgcaaaatgaataagaaagagaaaatctgaaggaacaacaaaaagtgagtagccttcttcctgcagacctggacaagatgattggaatatattctgggttgttctatggaaacttcgtcaataagtatggaatcataatctctctgatgcagaagtgaacttggaataatttaaaccagtgtctcccagtcacttcatcagagggtcatcaggggattttttgtggggggagtcctcttgcccagagattctcttcaataggcttcgggtgggaatgagactcccaggtgcttttgagggcagagggtctggtttcagagccattggtcttgccagcctcctcgctacagagagggcttctggccctgggaagcagtcttgtgaatggtccatggtgctctcagttgggaagatgattgagagtcttctctatgtgctgatagttacaaagcaatacaagacatggttctcagttgggaagagttcactctccaactgggagacaaattattcttgtgcaaaattacacaagatttaaacatgagtgcataagtacaggagctaccagaagttccatggcaaaaggcagtgtgactgaggggtgtgaaaaagggaagagattcctaaacaaggccttgaagaaggggagaattagctaaagagagacagagcttccaggcaggagtcgggtgagtgatgatgtcgagcctagaaagcctggtaatgttgaaacagtcagggctgccttgacaggatctggctcagatgagttctgggctcatctagaaggtttcagtgtcttcccaggactcttgaagtgtgtaaaacaggtgtggagttgtcagagggcatgaaactttccagcagctcccttcatgttggccaagcactctgtgacttttacgggtgtagcctgccatgccctgaggcttttggtggatgccagatgggcctcattaacccaccttcactggtggagaaagtgagtttcccatcggcaataagccttgacccagggtgacctagccaggtgcgggcagggctggggctgctcttcctgggttgagattcctagtggtggtgcctccctcttaatatgccagcacttttctaggactgcatggggcttggaatctcacccttgtcttaaaagcagcaagatgtgttaactctgagcactgtagttggtcccttgtggggctgttgagcggaatcattgtcatcacagaatggatgtaaagataacaatgtctgacgtttgcttcaaaataatatagggggtggggaaggagggtggtgagtacagatgtgtattagtccgttctcacactgctttaaagaactgcctgaggccaggccgtggtggctcacgcctgtaatcccagcactttgggaggccgaggtgggcggatcacttgaggtcaggggttcaagagcagcctgaccaacatggtgaaacctaaactaaaaatacaaaaattagccaggtgtggtggcgggcacctgtaatcccagatgcttgggaagctgaggcaggagaatcgcttgaacccagaaggcagaggttgcagtgagccaaggtcgcaccactgcactccagcctgggacacagtgtgagactccgtctcaaaaaaaaaaaaaagaactacctgaaactgggtaatttataaagaaaagagctttaattggctcatggttccacaggctgcataggaaacatggctgtggaggcctcagaaaacttacagtcgtggcagaaggcaaaggggaagcagacatgtctttcatggccagagcaggagttagagtgggagcagggaggtgctacacacttttaaacagccagatctcgtgagaactctgtcacgagagtagtactgggggatggtgctaaaccattaaaaaccacccacatgatccagtcacctcccaccaggccccaccttcaacatctgggattacaattgaacatgagatttgggtggggacacagaaccaaaccatatcaaaatgcaacaagattagtcatcattgttggctgaagatgggtaatggattcttcggggttcagtaaaccattctctctacttttgtgtatgtttgaaattttctacaatgaaaaggtaaccaaaattttatcatagacctactcttttctctcccatttcaatttttctggggtgattacagctttgtttcacctgccttctttatgcctttacccacagaatacagaagctggccaaagaggaaggtggagagaattttcttagggctttccgaagtcaattctcttatttgaaaatctttggctacttctgtccccttttcagatggcagctggcagctggtccagagagcaccaaacaatttgcaattaccacctaaaatagcagaactgatgctctgatcctcaggagggatcacaatacctgtgaccactagccccagcgtgcagtatttgcagattcatattcattctctgcagccacatccttccatctctccagccatgcatcttgggattagtgttagggagcacctgctccatgccaggctctgtgctggtgctggctgtgtgaagattatcagcccaggggccccctcactggggacctgggatccggatagaagtaactccaggaggtatgggctgaaagtgaccccaggaggaggttctgtggttaagaaaataaggggcagaggaatgtttaagccaaggagaggctcttctaagctcactctaactgcacctctttgacccctgggaaactgcatgggccactagaggatgttttcatctgcagtgtctgatcagcccgctctgcccctcactgggggcacccctgaggggaagggcctgggggtgccatctgtgataaccaacgtgcagaagggaccaagagctcgtggaatgcctctggccctgacattggcctgacctgctcctgcccccatgcacctgagccctaccctcatagtcactctgccatgggtaatctgcaaaacctcagccgctccctgccaagaccatcctcctcccacgtcggtctttcctggatctgggctggaaggaataaccaggaggatatgaagttccagaagagcagaagaaaactggaaccttggggactctttttacaacagaaagctccccatccaactcccatggggaattttatgttctgaagaattgccatatacatttatgccagtctgggggcacattctttagcctttgtctattctagcttggcagtgcaagccacagatttgggagggacccggggtgtggcttcccggcgatggcagatctcatgtcatggtcttggtcctgatggttcccaccagctttcccaagctctgctgctcccctggtgcctgtgtgaaggcagtgctgtgacaggtcctttcagggaccagccatcccagctggctttcccttgatgatacagtagccggagttcattgtgtggcccaaggtgggcaggcaggaagaagacctgcttggtgggatccacatcaagtgcagtcagctccaagtgagcctcttcttctaccccaagtgacaaccgaccctggctgaaggaccagtggtctctagccacacggtggggtgggaggagacatcctgggcagcagctttcttcttggccgacaccaacaggcttggcttctatccttgtttggccttggtctgaacaaggtccagtttaagtggctgaggtgctggaggccagtgcaagtcttgggtgatctggtaatttgtaggtggcactttcatgggctttacagagggttgatctctacagctccagtttgacataagggaccatttgccaaagttgtggtgccttttcttgtggacatcctgcccagtgctgagttcctgggccttttcttgaatgggggattggctgacttctaaaacctctgacttattcacaagcacagttgaaggagtcactgccttctctttgactttctttcattttgcatctccatatgacaagaggtgaggtccctccctcacttgaacattttatatctcttttctgtgtcctgacctctctccctgaaactgcaggcagctcctccttcattctcacctttactctgtgtttttcccagcccaaccctctatctcaacaataacagataatcagccacgccactcagagcactcataccatgctaggccagctagatcacatctctggacctgagattcccatctgtcaaatgagatacgtgatgctttttaacatttgtatggctcttattgcatgatttagctgggcgtggtggttcatgcctgtaatccctgcactttgagaggccaaggcaggaggattgcttgagcccgggcgttcaagaccagccctggcaacatagcgagaccttgtcttttataaaacctaaaaaaattagcctggtgtggtggtgagcccctgtagtcccaactactttggaggctgaagtgggagaatcacttgtgcctgggaggttgaggctttcagtgagctgtgattgtaccattgcattccagcctgagtgacagagcaagaccccgtttcttaaaaaaaaaaaaaattgcatgattctttgtaaattacatagaaaaaatcaaggaaaaaaagtcgattaaatttaataaaactcattatcaaaagtttacatagactgagggtttttagtcttggtctttaaaaaaatcagctttattttttgagatataactcacattccataaaattcactctgcttgctacatttttatgtaagggatgaattctgcatagtcttcaggaagatgctcctgttgccttttgtgcttatgaatttctttttaaaaatcatttattatttatttattttggttatcatgtgtccattctgggtttaggaaagggctttggtcgggaatggggggctggggttggtcctgtcctggcatagccaccgtctaatgacctctgggaaggatggagccctggctgcctactattctcagctgtgaagcccgactcccagcttatgccaccctcctcacagatttactttgagcatcagctgatgtctgtgcttgaggtgttgaagggggcacagagcatggaaagcatggaaaggaacttggagttaaaatacctggtgtcaggtcctgattcttttcactatctgtgtgaccttgaagtgttccttaacccaatacaactccaagagtcaccaactgcatggaacacagggtggctggtgaccctggagctgtgcagagcagagaccctgcctcaacctctctggctctaagtttccatagatataaaaagcggaggctgcagtcaatgatcttcaagtctttccaagtttacaatgcatgcctgcctgccttccttccctccctccatccctctgtccttttctttctttcacattttaatttttttttattcgggcagaggtgggtattaacaaatgctgcttgtctccagcacatggatgtgaacaccaggctccttccttccccagctcaatggaccactcagtgttctctgggccacacagccccacccagttcagcattatactcacactcatccgttggattacaccttttgtcttccccacacaaggtattttttcccttttggtggaccaggcaatgaatgacccaggtcagagctgcttccctcaggtgtttgcaaggccatctctgatctgatggtgatctctctgactttgctagaaacccgggaaggccgtggctgccatcatccaggacatccattcccagagggagagggacatgttccgggaagcagacaggtgaggccccaagccccaagtctccaggcaggttctgggcagtgggaacagactcctgtttctcattcttaggggcatttgagtcatgctgtgccctgttcttgcccctaccccatccatctgcttttctgggtcccacttttccatgttccccatgaaaaacaccagtccagttcagacatgctgctccggttaacctcaggaaaatacaaaatgctgagcttcccttcagctcctcaccctttgttggaaaataatataggaaaaggtctgttaatatttggccctttggggcaagtctacaccctattaaaacagcctaaaagtaatgcgtgtgtgtgtgtgtgtgtgtgcgtgtgtgcgtgtgtgtgtgcatgtgtgtgcgtgtgtgtgtgtgtgtacgtgtggcttcgtttagaaccagctcttggttttcataagttgaatgtagatgtaggaagtaaaatgtagatggttaaaaaaaatcagttatttgaacagtcactttctcgaaacattgaatatattcagttttccaacccatttcttccaaccgaagtttgtgatcaggccaagctggggctataagttgaccactgtcactcccctacaaagacagttcctgaagagaaccaaggtagaaaactgcaggagcaggcacctggctggcacgtcctggggttcttgctggggtggccacagtcggtgctgtcacttccctgtagagggcacaagcccagggtgtttcccccatgatggtcaaggcagcctggtcctagcaagatgcaccttggtgtcccctggtcagtgagggctacgtggttttcctgtgtttgggaacttaatgaaaaaatgcccatccttttagaatatcggatatatgactcagttgacctgcttaataaccaaacagccttcagagtgtatctgtatatatgtgcgtatatctttgtacgtaactgttcaggctgggaatctttatttgtttattagtctgtctgtttttttaaaaaaattctgattatttgggttttttaaagacgtgtaaagccacatcttgccacctgcaattctgcggcagagtggaggggggttaggaagtcttgttctgaaccttacacaggttggggtccttgtctgggtttcagtttcttcatctcagacgtgtagatcaggattctagagtatcttccaaccctaaaatgccttcctaattcttttttttaacctctgagcgtgccctccccaatagttagcatcccttttccatgcataaattgagctgagaaataaatgagaaaactggaggctaagaggttggcttcattctgatacagcccaaatgtaggagtggcttcaagtcttgtagctaagaggccggctaatggcacccagggttaggcagccttacccactaggctggactagggcaatcttgccccccagcgcccaccccgcacacccccaggaggagagtcagaggtccgctccctgagcatagctcccttccaagagaaggcaagctggaaccgagccaaatcagcccagttcttcttcctagttcccaggagcagaatgagtaaaggcacagcgagtggccagtgctgtgcttaggagaagtcctctgcacggaagccagaagggaggaaaaggctttctcctgaaccactctgtgtggttctgtagagttgggagttaagagtgtacacagttacatgcacagtatatctaagacagagactgtgtgtctgtgtgtgggtggggtgggatgggaggtgtgaagattctaaatcctgctccttggctccctcacagatatggcccagaaaggccgcggtctcgtagtccggtgagccggtcactctccccgaggtcccacactcccagcttcacctcctgcagctcttcccacagccctccgggcccctcccgggctgactggggcaatggccgggactcctgggagcactctccctatgccaggagggaggaagagcgagacccggctccctggagggacaacggagatgacaagagggacaggatggacccctgggcacatgatcgcaaacaccacccccggcaactggacaaggctgagttggacgagcgaccagaaggagggaggccccaccgggagaagtacccgagatctgggtctcccaacctgccccactctgtgtccagctacaaaagccgtgaagacggctactaccggaaagagcccaaagccaagtgggacaagtatctgaagcagcagcaggatgcccccgggaggtccaggaggaaagacgaggccaggctgcgggaaagcagacacccccatccggatgactcaggcaaggaagatgggctggggccaaaggtcactagggcccctgagggcgccaaggccaagcagaatgagaaaaataaaaccaagagaactgatagagaccaagaaggagctgatgatagaaaagaaaacacaatggcagagaatgaggtaatgatcaatttcttccccaggtaaggcgaggcaggccctgaaggagaataatcataataatataatgaggatgaacgtttattgaatgaatgaacatttactggctatttactatgcgctaggcactgtgcaagacactttatctcaatgaactcatttaatcctcacaggttttgagtaccaacctttgagcttggtactattgttactgcaggtgaggagactgaggcacagagaacttacgttatttgtccaagaacacacggtcaggaaatggcagacccagaattataccaaggagatctggccccaaatcccatggcacctgttgcctttactagaagttagggtgggacatcatggaaaggcctgtagtcctgttcgtccagtagggagtggcctgaggtgtttgcacccaaagagcctcccaagggagattagatctttggttcattctgtcctccctcctgccagaagcatttaccagtcctggaactctgaggagaagtggtgaaggagaagccgtcaccacctgctaaattaaactgggtgcccagagctgtccacagtgttttacctccactctaataaaaatgcacggtggctgggcacagtggctcatgcctgtaatcctagcactttgggaggccgaggcaggcagatcacctgaggtcaggagttcgagaccagcctggccaatatggtgaaaccctgtctctactaaaaatacaaaaattagccaggcaaggtggtgcacccctgtagtcccagctactcaggaggctgaggcaggagaatcactttaacccggaaggcggaggttgcagtgagccgagatcatgtctttgcactccagcctggatgacaagagcgaaactctatttcaaaaaaaaaaaaaaaaaaaaaaatgcatggcaatggctggcaccttcatggcatctgaaaggtctgagggcttgcagcagtacttcagttcacacaggggcgtcacaaggagggttgtggttaccaggtttatattctaacttggcttacacttccttcttgccagagccttctatatttaagtaggggtaggataagtgaggtttggcaatatgcataaggagcctaatttttaaaatcctccacacataccttctagtcattctgacctgggagttggtgacaatactaagtgcaaataaggaaaccaaatctctactccatgaacactgaagagtcaccttttggatgctacttcagcattcattccaacatgtatagatggagtgccactttgccaggtgatgtgctaggtgcaggcgagccaaaggtgaataggacatagtccatgttacagcagagactgaagtccagtggtggaaacagacctattaatataaaaataatttgtatacaatgggactcatgccagcatttacagcggatgagctgctctgtgggcaattattaactctgcacaggaacgggaaaatagctgctcagagagggtgatatttgagctgagtattaaaagtagaaaaaagcagtttgggttttgttttgtttttttttttgagacagagtctcactctgttgcccacccaggctggagtgcagtggtgtgatctcagctcacggcaacctctgcctcctaggttcaagcaattctcctgcctcagcctccttagtatttgggattacaggagtgcgccaccacgcccggctaatttttatatttttagtagagacagggtttcaccatgttggtcaggctggtctcgaactgctgacctcgtgatcctcctgccttggcctcccaaagtgctgggattacaggcgtgagccgccgtgccctgccaagattcttgatagaagcagaagccagggcaaaagtgaaaaagaaagactgttttgaagaacctggagataatcggcatggctgcatctttagggcatattagggataatgtttttaaagagtaaaatcatgactctgatgcacatatataatgaatacatgtcaaaggttttattcaactcattaattaatgacggcatcatgagatgcaaaaaccaactcaaaagagaatccaaagagcaggcaacatatacaggcaatcaggaatgctaaaatgaatttgctaataggtgtaaaagtggccccttccacagggggcagggaatcggttgcatctccagcagagacaattcatgtgcatctctaggaacaagaatcatttgtattaggatctgatttctgcaacttatacagttgtaaaatacctcagttcaagataatgaaaggtgcagacttctatagaatcagatgccctgaaaggatgtgctagacaaatgcccagcgttccagtgaaaggacacccagtagtctttttttgcccattacaaagtctgccacgatttttcctaactggcatagcaggaggaagaacaggagatgagattagggaagagggtgagactcatggaagacactgtgtgcctcaccaaggacttgaactggatcccaaggacctggtgaaccagtggatattttaaaaagtgtatgtgcttggaggtgtccaagttgctggtgatggatgatgggcagagagcaagagttggcaggggctcaaggaaagcctgggcttcatgtggataccaccagcctgccaaccctctctcccccaaggctgagaggtggagctgcttcctgcacttctactcacactcctgagactctgccctgggaacctcatttcttctactgttttaccaccctgctctcatcggtttgtataacattgctcatttaaggtgacactatgtgtcagccaaagagcccctgatggaaaaagaatctcagaaagccccaagaatttccccacagttctgtccctcaagttggttctgcctcttacaaccctggagtggggtcagtagggacttactggggcccctcacagattgtgtctttaggtttggagccaggcagtccaacagtgtgtgttggaatgactgcagaacagagagtattttgcactgtcctcaaactctgtatgatgaactcaagaaaagcccagaccccacagggctgcccctggagtcagataacaggtggcaactgaacttgggaatgaaggcagcagggcttgctgttcttccagtgcaccaggcacctcctgccctcagcgcctttacaggtgttgctgctgccgaggagccacaagtcttcctggcttgctcctcacctccttcgtctttactcatggccacattctctactgtccctggccactgcacatgatttcaacaccccaacctgctcttctccctcccaccactgcaaaccatctcaacaccccacccaaccccctcacctcccccgacactactgcagaccatctcaacaccccaacccattcctctccctccccaccactgcataccatctcaacaccccaacccactcttctccctccccgccactgcagaccatctcaacaccccaacctgctcccctccctctcgtcactgcagaccatctcaataccccaacccattcctctccctcgcaccgctgcagaccacctcaacacctcaaccccctcctctccctccctgctttcctgtttttggtggcatttaccaccttcaaacctatcacttaatgtctttattttacttagtgtctattgtcacccccagctccaggtgtaaacttcacaaggcaggaagttttgtctgttgtgttcactgctgtgttcccagtccctagaggagggcttggcacagagcaggtgtccagtgagtacctgttgaaggtatgaaggttggaacccagactctggaagcaaaggcctggcttctgagaaccaggtcagaccctgctttcttctgcctcacttttcttgtttgtaaaatggatgtgatcacaaggctgttgtagtactgtaaagaggtcatgctcattaaaatatcctgagctctctggagaaagtttctgtggttgagaagccagtgtgcgtgctgctccgtggtgatgggtggccacgtccatacctgagacccaatcctggccacaggaccataaagaggaggaaagaaatgaagtcacagataaggaaaacatggggaagaaacactgctacatcctactgggagggagggttcgagagtggcaggcccaggtgactagggaagggaagccaggctaatgacaagtggagccaggccagcatgatgggaccatggctgactgagaaagtggtgccatctgtggggccggagctactgctcagctccattctacagctgccatgcaggaacgcatgccacgctgtcaaatctcccttttcttagagcaagacaagtgtctagtataaaccaaaacatacctgtgggccagatgccatctagaagccccagagtgtaacccctggtataaccaatccataagaggtgaagatttttaaaacccttatgcttcagagcctagacaagacccaaccatgcgggaagacaggtgagaacttgttattcgccccacccccttctaccaatttcattcttttattgaccaatatttgtggagcacccggcattgggactatagttagtgacactgaaatgacccctgggctcgtggagctcatagtctagtgagagaaatgctaatccagtgatttcttaaatgaacagaagagcttgagtattaagtgctaagaaggagatgaaggtacgcaatgctgtgagtgcctgtgataaatctgagccttctcagggttaggctgtgcctattgagatttggaggcacggtgagtattgactgggtgaaaaggaagtgaaaagacagaggaagcagcatgcacaagggcctccagcagctccagggctccagcgttgccgtagcagagagctggcattagagtaacaggaggtgaggctgacttgtcaacagggcctacactatgcagggccttgtaggcaggttgaagatttttgcctttatcttaactaccaggggaagcaaatgaagtatttaagcaagaaaatacagtgaagaggctggacacagtggctcacgcctgtaattccagcactttgggaggctgaggcaggcagatcgcttgaggtcaggagttcgagaccagcctggccaacatggtgaaaccctgtctctactaaaaatacaaaaaaaaaaaaaaaattagccaggtgtggtggcaggcacctgtaatcccagttacttgggaggctgaggcagcagaattgcttgaacccaggaggcggagattgcggtgagccgagatcatgccattgcactccagcctgggcaacaagagcaaaactccatctcaaaaaaaaaaaaaaaaccaaaacgacaatatggtgaggatgtgatcatttttgcattttggaatgatcattcttgattgccttgggaagaatagattttgggggaaggtacagagcagaagtgggagaccagtttcgaagtggttcggtagcccgggccctgtggtggcagagccctgcttgcaacagttggcgtttcagtctcagtctgtgagctgctgtgggcagctgggggcacccgttgcacccatctgttccacttaagctgctgctctctcctggaagtgatcccacagcaaagggaagctctgaaaggttgtttcctttgcctgcagggtggaagagcaggggtctgcttggtggagggctttcagcccggctagcaagactgtccctgcctctcccaactcgaactgaagggggtccctttactgtgttgatctgggagtgtggctgcaggaactgcttgggaagggtaaggattattcattttgacaagagagggccatggataggtgattcagggagataaaaataaagtcacctgttggtagaagctataatagctaaaaaggtatttgtagttgctttatactcaggctagtgcagtagacttcagcaaagctttcagtggaatcttccacagcaaacactggaaacaaaggactttaggatttgaaccatgtatccctgtccagtaataactggtgaaaccagtcagccctgagcttctgctccagctggctcctagtcagctcaagggggtgtgtctgattgtaagaaatcagaactagagtggtttacttagaaccaacctcagccaagaatgtcctagaactgcagcttggccctcagaaagcccaggagtagtcattgatttggtggccaaagtttaagtcatgggagaatatcccccagaaacttctaatgtgggggttggcaaagttttctaggactagatagtaaatattttagcctatgtgggccaaggggcaaaattgaggattttatgtaggcacttctataatcacttaaaatgtaattatgtaaacgtgtaaaattcattcttagctcacaagctatacaaaaacaggctgtaggtcagattcggcctgcagactatagtttgttgacccttgtcttaaaggttgggtagaggccctaattctcaaaccaaacacctgctttcaattgttcagtttcacagacatgcgcactactgtgagggtcctgatttgggggaagggaatacaaggaaggaggaaagggagtgttagtttgggctatcactcaaggacagagggcaacagaaaggtgtgagggcactctgactgtgccctttctacctataagtgtcctgaatgatttttttcatagccaagatgactctgttggggaaatgtcaccgtgatggttaaccctggggtcttggccggcccaagtcagttcaagttttgttgcttctactctgcaaaaaatacccagtttgccaggtatttctgccccctaaagacatcgggccaggcttcaagacatttctctgcctccatttgtctgtgtgactgtgagcaaattacttaacctctctgaacctcagttttctaatctataaaacgaagatgctgatagcagctgcctccaagggattctgggaggataaaggaaatgctgtatgtgaaacctatctgagagctgggacctgcattcaatatcattctttttttcttctccctgtcactgctcactgttgatttggtttgctctgttcttcctttgataaggctggaaaagaggaacaggagggcatggaagaaagccctcaatcagtgggcagacaggagaaagaagcagagttctctgatccggaaaacacaaggacaaagaaggtaaagtttgtttcagattctgcacttctgccatgagggactgagtcacaggagtcccccttttgcctggtgatgtcctgctggatggaatatggctgagaccccaccattagttccatgaatgaaccagtcctcctagcgctactttggaggagtggctgtgcctggaatcttcggacagtttttattgaagcgatctttacccacatgtctgggctctgctcactctccagcaatttggctgtgttcctacgagaaaacatgtgcccaaaaaaagactcaggcttcagagccaggctcccaaaatagacaagtcccttggcggggatggggcgagaagctgctttgggcactcaagctggggccctgacttcagcaggcccagaccctaggattaacaagccatctactgtgcttgtatagattgttttacttaattaaaatgaaaaaatccagttacagttctcctgggctggagctgccacaacaaaaagaaatatccttggaacagggccatcttcgtgcctttccggtcaggagaggcaggagaaatgagtatcgctggcagggaagctgatctcctaaatctgtctgtggagttgggagtccatgggctgctgcagatgccaaggggaaagttctagaaggggcctagtagaagctttggctgtgggagtgtatgtacccctgctgggagagggtgcttggggggaattttgtgaggggctttgctgcagttacatttagtgatgacccagatgcaagaaagatgctccagtaagtatttagagtttataacttcattattcatgcattcaaaaactgtatattgagcacccattatctactggggcttgaaattctttgcgtcactttaaatatggtggattaagcattaagggcctattccaaactttgagcatcaccctaaagatgagttggtgccgtgggacttgagtggttcacagtaattgtaccaggtagaggtaagaatgctcagattcttcctgatttgagtggtccttatggccaagtcttgtgccttccagttgaatgctctcaaccaccctctgacctccattctgcatttttgtacaggaacaagattgggagagtgaaagtgaggcagagggggagagctggtatcccactaacatggaggagctggtgacagtggacgaggttggggaagaagaagattttatcgtggaaccagacatcccagagctggaagaaattgtgcccattgaccagaaagacaaaatttgcccagaaacatgtctgtgtgtgacaaccaccttagacttagacctggcccaggatttccccaaggaaggagtcaaggccgtagggaatggggctgcagaaatcagcctcaagtcacccagagaactgccctctgcttccacaagctgtcccagtgacatggacgtggaaatgcctggcctaaatctggatgctgagcggaagccagctgaaagtgagacaggcctctccctggaggattcagattgctacgagaaggaggcaaagggagtggagagctcagatgttcatccagcccctacagtccagcaaatgtcttcccctaagccagcagaggagagggcccggcagccaagcccatttgtggatgattgcaagaccagggggacccccgaagatggggcttgtgaaggcagccccctggaggagaaagccagcccccccatcgaaactgacctccaaaaccaagcttgccaagaagtgttgaccccgggtaactatctcccctttcctcacgggtggtcgggttgattggactcctgctcacctgataaagtatgagcatgtgcaggctggaatgaacataagtaaggtttcaactagcattaaagtgggtgcagaaagtgatttagcaacaaaggcaagcctctaaaagcctggctaaactgttagtgattttaggcaagtggtgtaaaggaagttagataggaggctgcatgttttctgagaagcaaactcagggcagacttctctgcatttacaggagcccagatggacttggataactaaaattagactgggttatcagcaaaaggagatcaggaggagcctcgtgcctgcacagcagagggccacccaggctgttatttctgtgatgggggcaagagtaggggatacaagaaaggagtggaaggggaaggaacagaggatccttaaagggtacagctgttccccttcttactacctcagacccattttttgctagggtctgacagtgatacaagacttgtttcaggatattctctcactccattggaggtgacgttttgtgcctatgcccggcactgtgacatcatgaaagagagagtttaaaataggctaagccccgtcttctctgccaagtggaacttaagatccatcagggggtttggggggagggagagagagtagcctttaagattctcactgtgaaaataattagggatttgctttacagaaagcctgtagcacaccagaggttgaagtgagagtcaggggcagaaaatacagaggaaaggcttaaaaatgaacatttcaacccagggccctgtgggtggcatgagctgttaggtaactgggaggcttgggattttttccatgtcaagctgacctgagctgttttttacctgcacggatctgagtttccatggaaaccccgccgtgaaatgccttcttgttgctagagaaaccgtgaggcccaggctctgtctagagaaggcaagaataaaggaggagtgaaatcttcacctcactccaatcaagccccttttattttgcggtataggtctcaacatgtgccagtgttagaggctcattaactgacccagtgtttggggttcatatttaataacagcttgacaagcttggggagagaatggcattgcctgttttgctagcctcggtggacgtcagcacaatttttgcccgtcagtaattcctctgcctgcagagatggaatgatactgagatgggaggcatggggggtggggggtggatcttctcaactgaaggcatcagcagcccatccccctgggccaaatgcaaacatttgccaagttttattgtgtgtggcattcttttggcagtggaaaaagctcctaatgacagtgctttggttctaattagcaaccattgccccagccttatgtgattaagcagtccaaggaacaattcccaatcatactatgcaggcatagaatttcagggactctttgaggcatgttgtatttctttttttttttttttttttttttttttgccttggttcatgttttgcagaaaactccaggtacgtggaaatgaaatctctggaggtgaggtcaccagagtacactgaagtggaactgaaacagcccctttctttgccctcttgggaaccagaggatgtgttcagtgaacttagcattcctctaggtaagcaaaacacacagtctttcctgaaattcaggtctaggaaataacagttccatagcaacctcaagagcttgagagagctttttggcattttgttgttgacatcgttttttgttcttttgagacaaggtctcactctgtcacccaggctgcagtgcagtggcatgatctcagctcactgcagcctcaaattcctgggctcaagtgatcctcccacctcagcctcctgagaaacttggacaacaggtacacaccaccaggcccggctaatttttttaattttttttttttttgcagagatggggtctccatatgtggcccaggctggtcttcacctcctgggcttaagtgatcctcctgcctcagcttcccaaagtgctgggactacaggtgtgagccacttcacctggccggcctatcgttattttaagtgtatgatgcaataacctagatttgcaaggggcggctgtaaactttcttgcaatttcagtctcccgtaatagaccagatactccgtgaaaacagccttgaataacagtgccctgggacccagaactaagaagtcctgtttttcctgtcagggaatgctttattcttgatgacatggagtctttaagcctagcctttattcaggcaggaaagcagatgcccagcagcctccataaagtcaacaaaaatgaacttcgtctgctattgttcattgctccagtccttcccagaacaatgctacatatttttttctctttaaaggaccaacttttctgaggcaatgatgctgaatagaatgtgtttggggcagactacccctagttcatagaaagggtattgaacagggagacctgggtttctgttcttcctacttatgggtgactgtgtgccctcaggtaagtcataccccttcttgagccttagtttcctctctgtaatttagacagcgattttttcaatggtggaagtgttgggaatgaagtggggagggagtttactgatggaatcacctaggaatgaatcccttttcaaagagaagagttaagcagagtctcagggtagggagtgaaggcactttaagaaagttccctgggagattctgacacaaccactaacccagcaactccagcctacatcatctttgagtcccctcgcattagctctgaaaggtcggaattagataaagtagtagtagcagctgctcagaaggagagctcaggaaagtgtcacctgggaaagtgtcacaaggaagcataaaaagcacgggtcatctgatgcctgatgaccacgtgtctgatcatgcagggaggggctggtcagtgtggaggctcgtcctttccatccaacttgctctttttttcccttctcctttaaaaaaatctcttactatttctttcctccaggtgtaccatttttatagtcagatctggagagcaaacttccttttttttttaagggataaatttgctgcacagcatctcccaagacaaaaacataagaaagaaggaaaaagaaatactaactttagaataaactgagatgaccctgggtattttagctctagaaaacagttgcaaaggccaccctgcaggagaagagagggctccttcatgcattcagtcagtcagcaaatacttactggataacatggtactgtgctagacactctggggtaaccaagaaatataacgcaagtctcttgtcatccaagaacttggaacctaattgatactagcaaaaattaagaataaattctgctaccttgtaatttgtgttttactactgtttttcattatagaaagtgtgaaagattattgtaacaaattcaaaaaataagaaccatatcaagtcaatattaaaggtctgattgatctcttccctccagtctctccccagtctccagaggtagcctaccactgtcatgcccagtttttctctcacaaaaatgggatcacactacacacataatgttctgcaagttcacttagtagcaggtcttagacatttcttcatgtcagtacatagagaacacattctttttaaccactgcaaatattccatcgtaaaagctatgctataaatgactgatctttcctctgctggtgaacagttaggctgtctgctctttttcccattttaatagctaagcttttattgttaacattccccatgcaggcaccatccctagggatctgtatgtattatcacatttaaccctctcaaaacacctatgaggtaggtgctgtttttatccttatttaacagataaaaaatctgaaatgcagagtcacacagctaataactggcaaaaaccagagtcaggttcaaatcccagtcatctgactctagagccatgttcttagcttctgttctctgctgcctttcagatgtgcttgttcagtggtatgtgtatgccagtgttcctgtgggagagcgtcctagccagggggttgtagggtggtatgtatttgcattttaaattttcataattgctactaaattgcactccaaaaagatggtatcagttttccctgcgaccttgagtgagagttcccaatatccacctcccattggattttatcagtttttaatctttcctaaccagttaggaagaaaatagtatctcacctttttaaaattggctctattgagttataatggatataaagtaagtgcatatcaagtgcatagtttgatcagttttgacctataaatatacctgtgagaccatcaccacaatcaagactgggaacaatgttcatcatatcccaaatttcctgtctcctatgtaacccctccctccccacagtgcaacccccaggtaaaggatctcctttctgtcactaaatattagtttgcattttctagagttttatataaagggaatcatattgtatgtgctagtttggcttcttttgctcaacatcattgagattcatctgtactgttgggtggatcagtagtctgtttcattcttcttcttttttttttttttttgagacaaagtttttctctcgttacccaggcgggagtacagtggcatgatcttggctcactgcaacctccacctcctgggttcaagtgattctcctgcctcagcctccggagtagctgggattacaggcacctgccaccacgcctggctagtttttggtctttttttagtagagataaggttccaccatgttggccttgaactgttggggtcttgaactcctgacctcaggtgatccacctgcctcagcctcccaaagtgctaggattacaggtgtgagccaccgtgcccggccagtctgtttctttttattgttgaggagtattgcgttgcatatatggatacatcacattctgtttatttattcatctgttgacaaatatttgggttgttttcagttcggggcctttacagattgtatttgttaatagtcttcagttagctttgagattcattatctcattggtccccgaaggaagagtatggtatgaggttctgcatttgacaggtgaggaaactgaagtccagagacttacccaggatgacatagcaaacgcaggttagaactcaggatttctcagcctgggcaacatagggagaccctgtctctgcaaaaaaataaaataaaataaaactagccaggagttgtggtgtaaatctgcagtcccagctacttgggaggctgagggaggaggattgcttgaacctgggaggagatccaggctgcagtgagccattattgtgccactgcactccagcctgggcagcagagtgagtgagaccctgtctcagaaaaaaaggaaaagaaacaaaaaaaaaaactcaggatttccgatctcagatcactctgttctccaggttcttccagttcaggcagcaacacagtgtaggaaaggctacatttgtgcagaaactatgaacacagtctgtggaatctgattccctgagtttaaatcccctgtctactacctactggctggatgacaaagagcaacttatttaacctctgcttggatttcttcatctgtgaatcagccatagtaataggaggctactacgcagagttatttcgaggattaagtgaacaaatactggtaaggtcttagtggcttccagtgggaggtacttaataagggttgtctattattattattcactcatgaaatatttaagacctattatggctcctctcaccggggctgcataaccctttagcctgcaggactggtcactactggcatggagacttctagggaggtgagagacaattttttggctttgtcccatggaaagcatagagctgaaataagggatgtcaaggactgggctcccagatgggaggaaagggaggccagtcgcgttgctcggggactgggggtgggcatggctggggaagtacactgcactctgcacttgagatccaggccagttctgcatgaccctggccagcgcgagcctgccaaggcttgctctcagtagaaacaaacagcatcgcctgcaaagtgcaagctccctcctctatccatcccagctttactaggatgacagagttataattacccgtgccatgagctgttattagaagccaaatgcagctttagtgatcctagtagaggctgaaaaatggaggactgagtggctccagaacacatcagggccggggcaatatgtcttgatgctgcctcttcatgtccccgtcacattccagaagtgtcctgagttgtgccatgggatatgtggtgtctgcagcaacccccatttattctgggacaagttaccagctcttggggtttctcctcccccaggcttctctccccctagtgctgcctggtagctgcctggtactgcctgaacttgcagagcaggggccagggaagaaagttgccaccaaactgtggagccgggttccccaggtggccttggggagaggttggggttcaagtgagaaagccaacatttaggcagttattaacagcttctgtgatgaaatatttaacacgtgtctccaaaccagtatttttgagcaacaggcaaaatgataggtgattcccctaaacatcacttacagcactattattcctatttcacagatgaggaaactaatctcagagagggtaaacagtgtgcctgaggtcacacagcataagtaaaagagttgggtttgcctctacattctattttctctccatgacactgtggcttccaaggtttttttttgtttgtttgctttttgttttttgtttgtttgtttgtttttttgacagtagaagtctttgttcaagtgaaatcggttccagaactgacagaagatagctctagctacactgctgggggctttggctaccagctcaatccctgcttcagggtctgtggtagctcctagggcatctgtaccccttctggggatcccaggacagggactcagaggactcaacagggggcttaataaaaaccccagggcttctttcctggtaccacccagctggttcatcctccagaggctgggacgggactgagagtgtggctctgatcaaagctctccttttttcccagctgcccctctcctatactgcgggggtctcggctccctgcagagcagcagcagagggaaaactattttgtaacaacgcaggaaggaggcagaccttgctgaatgcgcctctgccagcaccaacagccaggagccaggacctgtttgtgaggtggaggggagaactggcccccacagcccaagctggggccacttttccatcctttgcagagaggaagggaaggacactcaacctccctccgggcacctgggcctgagtgaggccctctcacttctggggaccactgctgagggcatggcgtgtagcctgcaatgtggcagttagagaaagccagactgaggaggacgcctcaggccccggaccacagccccactgtcagtccaggcaggcctcctgggctccctccttccctcccatctccctccctcagagctgcccttcacactgataagtggctattttgaaatgaaaaaaaagttctaatgacaagtctaggctgcttccttctgacagggtctcctaggcacttagctcagtgtcctgggaggtgggaggaggaaagtgaagccacccaaccagctgggcttgcagtcggtcacgctgtgccttggagcaggcgctgtcatgagtggagaccttgcctgtccccatccctgcaagaaattgctgttcccctgcctgtgccattcccaggccccttccttccttctacccaggatggccagacctgaaaccattgcccagccccagcagaagagaggcttgccccgcagcctgcaagtgggattgggtgttccaagcatcacccctctttcttagttccctgatgggtcctgcttctcacagccctcacaccctgccctttggctggcgctgcacagtcaggtgcctggtaaacagggcatgtgttcctacctccattctcaggtgaggaaactgagccccaggagcagttcggctgactctccccgggtcacatgggttcttagcatctggcctggaccctctcagagctgggctctttccactccactgactgaccgtgtcttcaaaaggagaactgtgacctgcaaaacaccttcgtggaggctggagcagccaccatcccttcaaggatgactcccctggctgtgacattgtcactcctctctggcggtggtgccagttgtttcctttgcttggaatcaaaaggcctcccagaattctgggacttatatttaataaatcacaaatgaaatgctaattgatggttcggatgtaaagactagaggaagtgggaaaatgttaatgatatacaatttcacgaaaaaaagaggacagagaattgtaattagggtatgactaaaatggcccccccaaaagaggcctacatataggttaattatgtggaagaaaatatttggattggagtgactctgggtgattttttccttccttttatttacttttttttctgtaaagaacataattctaaaataaacaaacaaaaacgagagaattcttcgagagtcccggtcacagcagctgcagagagaggtacagtgtgaagaaatgaaatccaacaagtgaaatatcagaaatgtcagaaatcaccttcattgttcttggaaggaggctgatagtaggagaacaggccagcggcaggccatggaatggctaagtgcttaccacaccgccgagtccatcccttacattcacaacaacctgtgaatgaagtgggtgtgagtctctttgtgactgttctgcaagtgaggaaactgaggcttggagaagctcagtaaccagccaaggtcaacagcaagtgaggggtggagctcgtggctcccatttctacctgatggctgccaggacacaggggcctgcctcccatgccatcctaaccctgcgtgtctatcccccatcgtttcccaggggtggagttcgtggttcccaggactggcttttattgcaagctgtgtgggctgttctacacgagcgaggagacagcaaagatgagccactgccgcagcgctgtccactacaggaacttacaggtaaaaatccactctccttgcccagcatgccaggggctccccagtctccataaccgagccaggtgtctggcgtccttggccttgcttgcctctgagtctagctcctacctgcaaggcctactccaggccacaggttacttgccattccccaagcacaccaggctgttttctgcttctgtgtctgtctccttccactacatggaaaacccctaatcttcccatagacttgattccatcaggctgctctcgacatggtggctacctcctgtgttgctcctagcacatgtctctactttaatacctaaaacatcctgtttgggttggctttggcaatatccacctctccctctatactgtgagtaactcaagttaggccagtgttcctctggcctgtgattgggactgaccccttcccacaagactcggatgttctagtttttctctgtttctgttcccctatgcaggtatccctgcttgctagaataaaaaaaaaaaaaaaaaaaaaaaaacactgctttgttctttttaactgttcatccatacagcaaatacttatcacaggcatgctaggtaccagacactattctagggaccagggatactggaacaacaacagtaaagtggacaaaaatccctgttctcatggatttttcattctaatgtaggtgacaagcaataaatgaaataaatggtatagtatgttaaagggcgacatataaaaaatactctatacaccgtatttcacccagtctaaggtgccatcatttgtaaggcaccactattttttggtaccaactagaaaaaaaatgttgcaaatcaagtgatgagactccatcaactgtaaaatgaatttttatttcagagatattaatgtgtgaaaaaatgtgtcttgagatcaatgaaatatggtaatatgttctataatatatacctaattaatatgtaatatattagaatgtggttttcatgattaacttctggcatgggctaggttttgatagcttaacagaagacatggtatatcagagggccaggggtaagtatctgaagacacctcctgtttttactacaaggaatcagactagttatttgaaccataaggctttgactcaagaagtcctcacagtggctgtgcccaagtcccaggctaggcattactattatcattaaattgtttaaaagtgactgatctagccgttcttaaccagggacatgaatcagactcatctggacagtatttctaaaattcaggtactaagttatatatttagtagaatttggaggtggaaggcagattgcaggaatatgtaatttgagaaagttctccaaaagattcaaatgtgcacccctagttaaaaaaaaaacaaactcagatatgggccaattttcttgtttaataattaagaaaattgagacccagagaagctatataattcatccaagtccacacagatggtgagttattgggcctaggatcaaatcgcctgattctgaatcactttcctctttttactctactatacttgtcttggaaactgagacccataatgtcatggcctgggtcaccatgtgcagagaagtatcataggctatgcccaaactcaagtcacttaagcctctgatttccctccggagagcagcttctctgtgactgaggcagccacagcacctgtggcccagggctaggcctctcctcgggcaaggcaagaaaggcctgacttggccagagcaggagggtcagactgggtcccacaaagccagctgagggaagtcatctagcttgaagacataatcaatcccttttcccaacaagatgaaacctacagaatggtaaggatggaaggggtcttggaaatcatctggtcctggttttcccaaaccttcttctttgtaccagctggcatctttttgaaatgcagcttcctgggcccggcacagtggctcacacctgtaatcccagcactttgggagaccgaggcgggtggatcacgaggtcaggaattcgagaccagcctgaccaacagtgtgaaatcccgtctctactaaaaatacaaaaactagccaggcgtggtggcgcgcacctataatccaagctactcaggaggctgaggtaggagaatcgcttgaacctgggaggtggagcttgcagtgagccgagatcacatcattgctctccagcctgggtgacggagcgaaactctgtctcagaaaaaaaaaaaaaaaagaaatgcagcttcctggctctcaccctactcttgttttctcattttctgtagggctgggcctgagagtctgtattgtaaaccatccttatatcaggctctgatagtcgatgtgagaaccttttctctcatccagcatttgcagtagtattgtgcagcccttcagggggccacatagttcaaggtcacctcggaagttaggaagagttcagacttgccagggcctctaattctaattcatgtatgtttcccagggcagtggactgcactgtgttctgagcctctgggccacgcccccaggcagactcccctccccgcagcaggccagagccattcttgtagttctcaagtgcattggggtagacattggttaagcccctcgtgccagccaactgcagtgtagctttacctggtgcacctgctggggagctgggagtttccaccacaggcttcccagataggatttctgtcagcggctttgacagaatgcctctgtccacacagcctcccccaccccaagcagcaggtaatggctgacacttaaatcaggcaacttttaaacttaacaccactgagaggccttgagttggggaccagaggttgctcctaaaggcagggagcaggttgaaggagcctccgctctctctgagcagcctgtgctgtgccccacggctggtcacggctctgcaagaacccacccagagtgattcagaacaacaggtggagtcagcgctcgataggaaaactagatacctgcttggctccaggccctggagcggaatgtgtccacgtactgggcgctcattcgcttgccttcctcagcacacggtttaccctccctgagccaaggcagaggagaacccaggccctccatcagcagctttgcctgctgccatccaccgtttgctcttctcctagtcaggctgcacccgtttctggaagccaactgcagtctcttctatggagacagcaggcagacctggtcatctcacacacaccctctcatctgacccacacaccaccccagaagggagggtgaggacaacagtgttcctcccatttaacagattaggcctctgaggctgggagaagaggagtggctttctccaactcatatggctggtgctgctaataagaaaagccaacattactgagtgtttattctgtgtcaaacgctgtactgaatgctttttgttgcctctcttcgacttcacagcaaccttatgttgttgttactgttattcccctcccttcacagatgtcagagatatttgataactcgcctgctgagggataggattgaacccaggtcatatgacttcaaagtgcacacacttaaccaccgtactggtctgcacccttctgtctcctaatccagtgctctttgccttttccttgctgccctgtcagagaaccccagctggggcctcaaacctgtcccagtctgcctcactgtgttgactccagatagcccaagagcaacccaacctgcctcatggtgttgggccgaggccagtcatagcagtgagtgttctggggtcatgcagaggcagccctcaacgatagaatagacaggcccatttttaaatccatcaaaagacctccaaggctccccacccactagcctgccctgacaggaaacaggttgttaagagtctcaaatgtcaggccgtggtgctgttttgcacaattgccataggccagcgctcatttaccctgccttccagcttccctccctctgccttttaagcatagatatgttgcctagagcttgggctgtttctggaaaacagagttgttttgggagttaaatgagcttatttaagtcaagcagttagaacagcacttgacactagataagggctttggaagtgtttgctattatagctgtactttctactctttcttttcttttctttttttcttttttttttcttttttttttttttagatggagtttcactcttgttgcccaggctggattgcaacggtgcgatctcggttcacagcaacctccgcctcccgggttcaagtgattctcctgcctcagcctcccgagtagctgggattacaggcatgtgccaccacacccagctaattttttgtattttaattagagacggggtttctccatgttggtcaggctggtctcaactcccgacctcaggtgatccacccacctcggcctcccaagtgctgggattacaggtgtgagacaccacgctcggcctgtactttctacattttctacaggagacatgtattacttgcaagctaacataatgaggtacttagcataagttctgtagccccagtggggatctctgaaccaggaaaagggtaacccccacagctgggcacagatgccaggagagggatgattgaggcatgtccgctcctctcctctccatctaggtccctactaacatgccccttcctccacttcccctcttctttccacagaaatatttgtcccagctggccgaggagggcctcaaggagaccgagggggcagatagcccgaggccagaggacagcggaatcgtgccacgcttcgaaaggaaaaagctctgatgcttctgcttctgctgctactgctgctgctgcaaggttggaaaggagagcttgctgaagtggggccttcctgattctggggacaggactaaagcctgagaggaaggaaaaccaagcagggcacattgcttgggcttgttcccagagactcagtgaaatgcccctgatatgtctccaggagcaagtcacccaggtgtgtccagcccactgagggtcaccaactctctccctgctgactcttgtttctctcaatctttcaattcgtttttctctcttttcctcttgttctttctctccctccctccttatgtgccaaggatcgtttccttttcacaaaacccaacttctcagggattttcacagtgtttaaattcttggtaggatataacaggtcaggcctagctgagtcaggcaaggaaaaggtttaatggaaactcctgggtcaggcgaacccctgcagtgagtctacagcagtatctctgcctggtgtcccatgtatcccctgcatgaggagctgagtcaggtctgcagtcctggtgaggggacatcacggacaatctgttggcagagctgggagggtcttcattaacctcttcctccaactgggccacccttttgaaaagcccctgtttttaataactgtttcatcctctcagttattctagaaatctgccagacttatgccttaaagtaaaattaaatgaattttagagaagatgaaaagagcccttcattttggaagctctgataagtttcctccaaacttattcccctcctcttgatttcaggagatgtcagggtttttctattctggacaatgaatttggtacagagtcactgtaattaaatataaaaacagaagcatcttcctccagctaaagcagcagttggcgcgggcttaggttgaatgctggcctctctgcaaagcacagctttggctcgagaggcacagctccaggctgtggaaaacagagttgtcttgggggttaaatgagcttatttaagtcaaggaaacatcatctgtccttgattcagccttggtgcctgcactctggggtacaaccacctcacagtaggatggtttttaaatggccccccagttgggggagaagctaaggaaagagaaggctgcagatccaaagagtggcattgaagtttgctgggtgtctgtaggtggaccctttccagctgggcagatagttgagggctccctgggtttgactgtatgtgcagactttgataccaaaatgttatgaaaagtcgtgattcccgctgctctttctggtactggagggtgggtaccttcaggctgtggggtctctagcctgatattccattgaaagggtgtgggataaaggtgctgggggaaatgaggctctgccacagccatagagaggccctcgggcagttaagaagggagcctggagctgttttcatgagcagagatactctcctgaaagcacccttcatagcttagcccaggaaaaataaaacaaggaagacaggtcactctcccctaggcagttcctgttgtttctgttcctgaccttgggcaggcagactgagaagggactgtgtagggttttgttttgttttttttcattttcctttttatggcatgtgagagcatactgtacattctgtcctctgtactaatggaggaagggcagagagattagttcaaggctaacattttatatcaggtaactgaggcacacaaagggaacaaatgaagaacataaaatgatcagtgtaaacctgaaagcacgcagtcattggcaagggacaggctcatgggagctggtgagagagagcagttaaggcaagcaccaggggaaagcagaccaacttgaacagatgtgatgcggagaggttggaagaagcaagaaacctgaactcatcatcaggctattaaataaaatttataggaggctgttggtttggactgagctcctgcaataggcccaacagaccaaaacaaaagggagtcactcatgttgaagttctgtcttccaggaaatcaggagagagagagagagaaagaatagccaaatccccaaacaggccagttttaaccagcatgatgaagtgtccttggttttaacctttataaggaaagcagctttgagatgaccagtctggtttttgttctttgtgtctgctttcctcagcccttttctgtctataaagccaacctcctccgctcagctcatgggaacactcattctattttatagaatgacatgttgcccaattctagaatcaaaaataaaggccaactaagatcttcaaagtaaatttgttgtaattttatcttttgagaagaccatatgggggctgctgaaaagttggtatctcaaataaagtctgaagatcacggctcagcccagattgttcccctggccaactccacaggtttgaacctggcattctggacaccagctatgcctcctccatttctcagaaaacctttgatcttgtgtgtctttcttcctactgaagggaattgtgggggcagttctttggccttcttgctgaactttgctggaaatagcccacaatttttatcagaggttagaactgtacattatcagagagactggacactttatcccctagcaaagtgggagaagattttaccagctcattccactccaccctggccttcccccaccccccatccccagcagcatttccatggaaatccagatggtcgtgtagtgttatggctctcttgtgatagactggccttcatattggagagctagggagagcccctgggagggagagagataaggcgctatctgccttcaatcagaaccttcggtttaaaatcatctaagagtctatacttgtgtgtacatacgtatttatttttatttatttttatacaattccattggcatggtccttcaccgaccctatgatttgcactttttatttctatgtgtgccacacacaatgcagtattaatggcaaccaggtaaatattgatttattttttaaagcttttcttcagtgttttgtcaaccatttcaaagtgtctcccaaaaaaggatgctgaagagcaattgctcccttaagcaacagattcatatttaccctgggttaatacaacaaaaggcctgtataattgtcttttcattgttaacacccaaaatagcatctatctagacagtatccccaaagaatttggaaaatctgatggtgtgagcagcagccgttagtatcagggtttcccattcttggacagtccgaggctgtgacctgttagataattagattatacttgaactggaccagagtttgttttttgaatttatgagaaaaaccaaaacactaagttaagtttgaacttgtaaagtattgaaatttgttgagtgtcctataaattgtcactacttttcctgatctgtataactgactgcaaagtgtttgtttttacaaaagagaaaagaaaagatttttaataaagagaatttgaaagctgtgagtgagtgactctgtgtcatgcaggggtccctgacatttggctggggaaggctcatcaagcagaaaggttgagatttggtccctttgaattgtgaattattttcaagggttgaacagagaggacaaaacaggttttcttagggctccagttaggctaccagagagaatcagagattctcaggggtgatcctcgggggatgagtctgactaagtgggggctgctgtccttttggaggctcagatacgaacatttcttggcctcttataaactcctagctttgccacccagcgtcctgcaccagggttaggccatttctgtaagttccattccctgtgaagatgaatatctggtggtcagtgctgtagtggaaatagcaggcacaggcagaggtctggccctgcccctgttagcccatgacttcctaaggcccgcttccttgggtgtaaaagaagataagagtattacttgctccgggtgtggtggctcatgcctgtaatcccagcactttgggaggccaaggtgggtggatcacaaggtcaggagatcgagaccatcctggccaacacggtgaaaccctgtctctattaaaaatacaaaaattagctgggcgtggtggtgcgcacctgtagtcccagctactcaggaggctgaggcaggagaatcgcttgaacccaggaggcggaggttgcagtgagccgagattgcaccaccgcactccagtctgggtgacagagcaagactcagtctcaaaaaaaaaaaaaaaaaaaaaatgaatcgcctcccagggttgcttcagggttaagataattgctggtggaagcacttggtgtgctgcaagtcaccgaatcttgtttgtttttgcaatctggacagcagccctccaaatttcaggggttcttaagttgtttctcaaccatttcttctagcaaaacaatgccagtcttctaggcccagttggccagtcctttgaatggcccggaaccttctctgggcccttcccttttgttggcagtgctcctgagtcaacagggaggggctgggcagcctggacccagagggcaaagtgagggggccgcctgcaattcctgggaacagattgcaggtctgaggaaagttcctgctgagcctgttgctgtctgcgccccacccccacctcctgtggccatggtggaccaagctcaggcctccagtttccaaccaggaggagtagggaaacctccttttctgcaactgctatctatgccccagatggccaaagcagtgaatgggcctagactggttctgctgccctaagtacaggatccaggatgcttgggggtgcccctggtgcctagtcctagcatgttgttctatgtggcacaactctagagagggcatccacattgtatcctataggatggcaccccctggagttgtgcaatgcagacacccagccagggacacccccttccctcgagttgcagttgttcccccaagcctgggtgttcccatttgctct

SEQ ID NO: 506 - DNA, 224656 bp, Homo sapiens
  source 1..224656: mol_type = genomic DNA
gaattttaaatcagtatttgtgggatttaagctccagcggataaacctagagccactggccatgaagggtgtggcagtggggtgaaaaacgggactcccgcctccactccctggctttcctcattccagccactatagaggggaaaatacgtagaccacagagcaacggccacaccctctttcctctcctccaaccccagaattccacttcagtctcagagctttcagctaggtggggtttatccccaaacatgccacaacccctctagttatatgggagcggtaactgtgaaccaccatcgctggcttgatcctcccttttccgtggattggtgctcctgagtatgtttaccggtttcagtacataacacagccagatagagggccgcggacttcagcggcgagaagctacaacaaaaatagggtgaacaaaaacgaaggtgcccaggagcctgaattgcatttctttcttacctttggtcatagaaaggagcacttaggtgtttggctggaacgcaaagtgagaccagagcttacattcttagcagcctgggtttgtctcgagaggccatgcttctctcctccctgacattttgctctcagaagcaccagttagcatcagaggaatgttgtttccttctctgaaacagccatcaagtaccagcgatttcttggctccggcaagttaagtgctctgacccctcccttatctaactcaccccgcacaccatccacatggcaggggacgcagccagaaatggagcggactgcatcttttccttgcccactctttttatcaccatgacagagccactggacaccaggaaataaatactgaaccaccacactaaaacgtttactccactttgggcagaaggagcctattttgcatattaagtgcctcctataaagcagtcaagtgagggaaagaggagttctcgctcctccgtgaatgctgcacgggagcctccagtcgggaacagctgaacaggtagctctgaaagaggaccttggtcataaacgcatagataagattatcccgaggttctcgcccacatgcttccttaccacaggtgggagggctgctgttaggctgtcttccttgctgagcattgacaagcaatgaaatagttgaggcgtagcagcaagaaaggaggaagaaaaagggcctggttttttggtctttaagaacagaccactagtggtgtattttgggctggatatttgctgagccgaccgttgacgtgctgagctgacggttgacgtgctgagctgagggttgacgtctctggtcattacacagatttaaataaccagcaaaagtggggtggaaaggtttttccaattgttttcaaggaaatgtattttgaggatatattgaatctgacataactttcaactcactttcaaaccaatctactgagctgaagaaagagatcagaaatgaaatgaaattctgatatacacttaatcgacttaaaaaaaattgacaggaaaaataaaatttcagatgttttttattcaaaggttctcaaaagaaataaaacagaaaagctaacaatctgatcaaatgtacagttcaaaaatgtcttttggcgtttaacaacaagtcctaggaaagaaaactacagagttatcttgaaccggacaaataagttaccactggcaagtctgtggcactagtaaaacaaaaataaaaaattaactctcttgatcatatagatatctctatgaaaatctttttttttcaatctgtacaaaaggtctttcttcataaattaatttttttataatttaatggctgtctactatgtgatgtttaactgatttttttttttttatgtacagaggttatgtttcccaaatcttacccagacgagtatggcacttagttcagacatttctagcagcagatttcccctcccctctaaccgagctatcaaatttctgtcttaactaatgcaaaaatatcaagtagtgagagacccaggtttataactgtactaggtacacagagggtgctgcgttcagtctggactttcacaaagcagtaatattccagggagcatagaaccaataataccacaactttaaaaaaatgaaacaaaaacaaaaacaaaaacacatttctcttatgactatgtaattttcactagaatctacacttctcagagcagcaaggacttttgaaactatgaaatgtcactgacatctatcatcaaatacaagcataaaatttaagaactaaaaaatacttgaaagaaataactgcttagccctagctcctgagctaggaggatttggtctgtggaaacagggagggccagcaacctgtcccagcacaaaagaaaatagactctgaggtagataactgatcatacacagctgaccagacaagtacacagttttggaagacaacttaatttaccattgcttttaaaacatatgcaattgccttaataaaagagctttaataacagtgaattatcttatatgtactaaagtagaaataactgtgtatttatgaatcaggaatttcatagtttcaaaattggttttctttacacttgaacacttgtagtgatgatgtaaagtgtggcactgcttggatccaaatcttccttcatgcttttttgtttgtgtgtgtccatacatcaattaaaattataaaacctaaatgcaaaggtacaaaaaaggcacattctcctaaccgcaaactggtccggcaaaaataaagagcacagaagatgtgatgctgagacaagttggagctactggttactggctcttcggtctttggtgaagttacctttaaaagtgccaagtcatttttatttttcaaatttacctaatagagagagagagagagagctagtagccaatcgttttgcttctattcgttatctcagcttatgtttgaagataaatccttacttttagcttttgccactttgttgcaatagcaacatttttcggtttgccagatttcaggcataattctcattctaaagcactatcattagtataaaggaaggacaaaacattcagtgactcccctcccccacccccatccccaaccccaacactacctacactaaatctagtacatcaagttagctttttttttttcctgaaaaaaggcaaaaaagactttacattgcatcatacagcagatatcctaaatcagtcaaactatcagaggaaactgttggcgtacagccttacaaacaatttaccctaataaaagttccccagtcagaaaatgtgtttcacacaaaacatttttcccttcttgcatttcactaccttacacattatgtgaaaaatcattaaaaacacctactacatatttaaaaaagccaaaatttcagcaacttttattgactaccttttaaaagccctatgctgctgttttacaaggcataatagaccagctcatttggtcaaagcattctacatcattagtttgaactaacttttactgaaacagctacagcatcaaaagagttaaggcaaattggaattcatagaaaaggataagacacttcacactacgttgaaagaaagacagaaagctaagaaaagagacactgacggcaacactgaattacagcaacactcgcactgcaagcacagaacaccatgggtgaagtcggactatttaaacttcagaaagcccatttcatacagctggaaaaaaaaaacacaaattaaacacaaaatgaacaaaaccacaaaaatccggtcatgcacttggataagtcttcatggtctttgtgcatacccagaaaattgaagttttcttttctttttttttttctttttctttttttgcatcataacatttgataaaaatcttttgtttttgttttttgtttttttttttttactaaaataaacctgttcgggggaacagctactagatgaatttaagggttttatgcaccttatagaacttatagcaaaaatagttttagttgatttcattataaataacgttttcaagaacctgtgcaaaactgtcaataatttcctaaagcacaattgatcagaaaaatccatgattgttcagccttcacacccttcttcatgtaagaacacctttctgtacatctggaagagaaaaataaaagacaaatgcttttgtagatttggtgtgaaacactacagagctttgtaatctgtttcttgttttaaagagatatgtgtttgaaaaaggttatgctcatcactgatggtagactgataaatgcagactctggaactgatggttactttcaatgcctgtcacatccaggacttgcaaaatactttcttttctaatttagagccaaattcatttgggtctctaaagagtgactttatgaaatcaaaaatacatgttatcaccagggcaatccagaaaccaaggtattctatatcaccagggcaatgcagaaaccagggtattctaagttctacacagctattttattacagtctgcatggtaaagtgaaaagttttgaaatttgtggttcaagtgagagttgggaatataatctttcaatctaaggatattgacatttatctaaattcataatcaagatgttgctaaacttgtaatgctagattgagcaacatcttatgctataggtcctccagtttctgagtattaaagtaatatgatataggatacttgtattatagaacaattttggttcttggtgttctctgatgttacagatttttatttttttctttttagtggggagagtatacatttggcttcagtataaagcattctctttagacaaaatgattaatcttaaattcataaaatcactgattttaatatttcaacaagactagatgccttggccacgattaaagcagtatgataaaatccgagttatcccaatcaccattctgattttaaaaaaagccctatagattgtgcttgatttgagccccccagttatgaagacctttccctcatacctcacagttacttattaggttgaaaggtatatggagaatggtcattagacgtctcgacagccacctgctgttgaccacttgcctcctacaacaaacaaagcagaatggatgagacatgttagtgaaaaaacctcagctctgctacttaggcctgactgaatccaacagtgccttaaaaacagttactctttaaagtaaatttcttcacgtcatgtagagctttcaaggttaatcatttccctaagcagctggcatgtctaacagacccaaagcacctcccatccaaatgtttatgactttcctattcttatcaagctacagcatatcaaacaaatctcttaccctcttatcccctggggacagatgtgatttggaattcagtattttcagattttataatctgaaatgtggtatgcatatgctgtatatcatttaatgcctccagtagggtctagggctgcacctcataagcaaacatattaatagttctacactggaagccatgaagcagcacagttaagtgggatcaagattttgtctcatctcaattcaggttgagttttgccataggtcaggttttatgctaaagtagttacaaagataatttttattttcagatttctttttgggtttcagattgcaggtaaggaattgtaggctctggtaactgtggttgtcagtaattgcacaaacagaagtaaaatactactaccaccaccaccaccaccaccaccaccaccaacacctactactactactactgctactactatcaccaccaccaccaccacctccaccaacaggccagagtcctatgatcctttcctggaattggaacctttgggatctgcctagtgggcaagatcaactggattgatacatttccttgaaattttaaggatactttgcaggaaaatgccacgttttctctctaaccataattcaaatgctagacttctttctttcatatcagtatcttccataacaagaacagttatctagccatactaacagcctctgtaaaaacagctatagcttcttcttcatccctgtagcagtttcaaaacagctttctcttttccactaagtatcttaactacaactgatttcttttcgtcattattaattatcattgatacgatctttagtactgggactgcaaactccagatttatcttattatgtctgtagtatcattttatgagagacaagacagaacgtccgaggggtatgaaaggcactataggcttagaaaatatttctgggagtcttaagaggtgtggcctggatgttgttaccctaatttgtcatgatcatagctcactgtagttgcaaactccagggctcaagggttcttcctgcctcatactcctgagtagctgggactacaggtccatgtcaccatgtctggccaattttcaaacaattttattttttgtagagatgggatctcactatgttgcccaggctggtctctaactcctgaccataagcaatcctccctcctcagccttccaaagtgttggacttacaggcatgacccaccacatctggctaaacgcaattctttatgcaaatatttgacgtctggtagatttttctgagttctatttaatttacccatttctgaaactacttatagccagaatggtcactggatggtctctaccaacctcaacaggaaccgctgtcgtctgcatatgtgcatactgtggcaagtaggctccttgcatagctgacgttgcaggcatgtactagaaagaagaatgaggtcagaatgggcaatggtaaaccatgcaaaatttggagtacgtggggggattgtgagatggatataatgtatttggaaatctcaaagaagaaatttaaatgggctacacctcaaagcttaaatagtgcatataaatatgtcatatggaaggtaaactgttttctactttttgaatctgctaaactaaaaattccacatttctttggatttgctaacaaagtgaagataaaaaaagtttattatgggtgaagataaaaaagtttgtcactctcaataattcagtatcactaatgtgtgattttagaagatctctcctcaaaggacctcattattttctagcagccccctaaactagtacctagtattgtttctacaggtagagcccacaggggtaagacttattagacctctaacaggtcactgcagattaggcagcagagcctggcttttctgacactgacagtcatcctttcccaaaggcaggagaaatttctagtcagtctcattggatatgtgtggccctggcttagccttcacaagaaacagctgtaggttttgagtgtataaggggaaaacgcaccaccctttgttcttttaagccactatagaatagaggctaaattaaaatcctttagccatcttaccagcaaaatgctaagcatcaaatctggaagctgatctggtgccagctcaacctcattacccaaaggagtcccctggactttggtgaaatatttcaatattaagaccatgattcaatactcccaaactccataaaagaagaaataagcgagaaataattccctgcttttaccatcttgtattaccttcgtctttcgcttcatgacactgccacagggacagtggtactagttatatagatgacactagtcataaaaggctagatgtggtcacgtgtgggtgctatattctcgtaaaggagagatacccagagaatagactttcagttcatcaattaattaagaaatagctgagtatttactttatggaaggtcatgtggggggaagagaggggattagacataatctgttatcatagaggctgtcatttgatagggaagatacaggctgcattaatttaccctcctctgtttacagagacacatgataattatttgccacctactgttccggtgctgcctagtgacagatgactcatctgctgggccagagggctgatcattgatgcgggctgtagtgacatggtgtgctccattgagggagttaacacggcaccctggggagttggagacaggagcaaaattagacaaactgaggcaagagttaagatcctgtaattactttttacaaaggaaataccttagtttgtttaagaatgtgaagcaaaaacaaccttcctcaatcttgcaaatggcatcataaacagtttcctaaaaatcttctaaattgctcttcctgagagttttttaagagcgttaggggaaatgatatcttggcattcacttcacaacaatccctgtattaaagccagtgtccctcttctccttccctttcccttcacttccagtaactggaagcaagctagtccagcaggaggagctatcataggaaaaacaaactgattatcactgcctgcctagggttacaaaacgctttcttaaaaaaaaatctggaaaaaaaaggcagttgatgttttctccagtcaccaaacaatgtattatatttaataagatcaatatagtattttgtttaacaatgttctatccagataatcgtctggttcaagatcaggttgttaggatcaagagcacatttcttcattcactcagtgtttctcagaactttaagttacattttggtgcctgggagggaaggcaattcagatatgattaataatctgagtccagattcttttatttaatttgaaaaaatgttagtcattaaaatcaaattaaatatatttaggaaaataggagggaaaaaaaaaacaattgcttctaactcagccagtctaatacaaccactgttagcaatgtcagggtactactgccagatcatagcctctgtgtgtttctgtacaggttcaatcagagcacatcaacaacttcatatcctgggattttgctcttaactttgcattctattctaaccatttacctagcttgttgaaaaactatcattatcatcatttttttaaatggttacattgattgtataaaccaaaattcaatgaactctttatttttggacttttgcaatcacctcattatctgagaatgcaagtattctgacacgctctgtaactactaatgtatgttttgttatcactgtacctggcatcccttaaatacaactgttatttattgataattagatagacaatctaggacagagttaggtgtacaggaactttaattctgatgtaaatcaggcagtttaaagctgggtggggaaaggtaatgaatcctcagatagcaaccttctgcttacattcctaatgtctcctcaaagatgttaagctcagatacgtgcagtctttttctcaaatgttgccaaaaagaaaaaaagatatagatgtgtgtcagagataatgtttgtcattaatacattctgttagaaattttttttttaacatgcatcatcaaaaagcaagtggtaacacggaaatgactcagaagcctagaagatggtggagcagtttcctgctcctttttctcattcattggcaccatctgtaataggaagtcctcaaattcaaagcaagctgatttccaagcattccaaaatagggtagcatggagtatcagggacacagattgctatgggcatgtgtggatcagtgcatgtatattatgtacacatgtacaggtaagtgtgggtttgaagatgtgtctatgtatgtgcacatgtatagatctatatgtatgtgtatatatcacacaaaacgtatacatatatcagagcgcgcctctcctatttcatcacctaaacatgttttatctgcttcttaaaggtcatctcagcaatttctcattcagaacctgttatccctggattgctatttcatatacatggtcttacatcgcagtatccactttaaaaggtatccgaagacaaattgctgtctgaacataaggccaagaatacagttctttttctaagcaaccaaatctgtttttattttacacatattgtgaactgtattgcttaccaggattcccattttgcatcagttactagaaagcttagagccaaatttgtgattttctcatgtgagcatgcagggtcattgtgttggacatccttagccttattgtaactttgttctccatatgtatttttaaattttcaaacccttcttccacaaactagatcttatgtgtctttgaaaaacacatgaaatacactatataataagtataactcattcaatttaaaaaaatgtaatatatatgaatgctcacgtcattaagaaatcacatttgttatttaccaaataatgtgctaccactttagtatttataatctccatagaaaggccaagtaacactgatgaaaatcttcatctcggttttgaactttatatctgcattaaacagaatgtaaaaaatgagagcggttttatcccaagtactattaaaaatgtagcctctcatttgaatgatctctaaagagctggtatgaataagaaaatggtgccctgcctcaaatatgatatattttaagttcttatagaaaatgtaacttaatatcttctaccaagttgttttataaggatgagaagaagttttataatgaaattgtacattctcatattccatgtttaaaatttcccaaatcctataccacccttggcaaatggttttaacctagagagaatatacacataacttacttgtaaaacacaaagtcattaagataaaaaacttacagggtgctgtagaatatatggttgaggttgcatccacgaaggactttgcacctagaaaagggaggattttgaaagaaatattgattttcattgtaaagcttacctatttctttagaactctttttaatcatgttaaaaatctacagaaagaaaacaaggaaacaatactatcaatgattaaaaagattaaggcagttagaattcttggcaaactggtcactctgaacaggatgaaatgattatttagaaacaatttctatttgcccactcaagaagtaattgttgagtatcaggcaacaaagagaaaaaggcgaaacagactgggccccaccctcaagaaatttactatctatgcaagggagataaacacagcaacaactcaaatagtgaaaagtgttaacaatcaaggtatgaactaggtgctttagaattacagatgaatgacgattaattccagcacatcttattagaagctaacccttaaagtatgtgcttatttaatacaaaaaaccaaattcaatttctctttcatatctaggacattaattttagaaatcttgtattgtggtcaacaatttctacttagtgcagaaaataaaaatctgaaattcagattaaggaaattaaacttcagtaactagattttgacatctacagtcaaatgggcatccacacagtagaccctctgaattgagaaatagatgtgagagtcaggttttgtggcaggaaagaaagcatgtgtagtctgccactcaagagaaaaacatatcagcccatttcttgatgcccagagctttccagagtctaagtaattttattaagtttcagtttccaattcttaacaacaaaaccctcctgcattttatcccctattgttaacttcagaggttcaacagagaggatatggggaagagtcatgggggaagaatgtattgcgatttaccttgatagcagagccccgatacttgttttctctggtttcctttgccacctaaggcagaccaaagttaagtgcttctgccttgttaacatttcagttatctggactgtagcctttccccattggggttggtggtttcttgcagctgccaatttctcaaatccaattgcataagcttatggtggtttagtggagaaaggcccactccaacatgagtgcagggccctcactggatatatgatgggaaggcaaacaactccctacagaccctaatttgggccagatgcccccattttttatatgcttcagtggtcttaataatctaatagcttatagcattacaggattagggaactatgacatctaattttctttcttaagcagcaaatcagctgctgtcaatttctattcctcaattttctaattataaaatgggaataataatgttttgtaaactctttactattggttcttaacctctttagggtcatggagccctctgaaaacctaattagggaaatagaacatttttccccacttaattgcacacacacaagcaacattttgcaaacaacttaaggagtcacagatcacttaaagctcatccactgaccctactaggtccctgaacttatgtagttaaaaatcagtctttgaggctatggcaccgagtgtcaggcaatgcaatgaaattccatatgtatcttagagaaatacagaatgcccaggagaggaaataaggcctctgaaataatatgttatttctagttagctatatcaaatctattactgacacagatctcctaatttttattgtacaaaatggttctgtggccaaatgcacactggttttatattataagagggaaaaagaggtgttggagaaatgtgttaatagctgtaatatctatagcaacataaattcaaattaatacttacaacctttcatttgcctgagaataacttacacttgcccctattttcagtgacatataaatgacagaggtttccaagttcagacagttaagaaagactaccttttcatagcagacacatgaattgttaattagggaagtgcactagagcagatctcactgagtcttatacagtcaaagaaaggataggaatcctaaatccaaaacaactaaagaggcattaaattagtcaatactacgcccagcagaatgaagcaccagaataagtaacataagaacccagagagaaaaaagaaaagaaaacgagtgacaactcagggaaaggaggctgtaagagcctagaagcataggagactgtgaatgataatgccaatcctcagttttagcgtatctaatcacttctgttattcaaaaccatttttatgtttttaggcagaattagttatatgacattgcttatgttggccaattcattatttaaacgtataactaatatactcttattatcagccacctaatcatgcatattaatgataataatcatagctaacattaactgagtgataatgatatgtgaggtccttggctgggctctttatacagtctcatttggttttcataattctctcaagcctatgagatagaaactattattatccccattttaaagatgaggaaactgaggcttatagaagttaaaataacacaactattagattacatattgtagtcctctaaccccagaaattaggactacaacatctaattcaattgttttaaaatcaagaatacacaaaaatttagtcacacaggatcctgatggtcaacaaaagggaactctgctcccacatgtctgcaactgaactccattataaggttcctatctgggtccaggaagtaatcctgttagaggttttctgacacaggaggagaaatgcatgtacactactgggttcatggcggacaggagctacctttgcattaaaatcaaatcaaatcttgaaatacaagacatttcaagagtttttgttgctaagttgggaatttattttaaggtaaagcctcctcacttaacctaaacaggaagtcacctttttgcttttatatttttacctcaaatgtcagctgcattgctcacttaatgctacctactagagacacatctttatgtattaccatgtttatacttgttcttttatcagttcctgctgaagaataaacaaaagcaagggtacacacctattctgtattatatctaacggcaattatcttaagtttcaatttttgggacacatggtgtccaaaagcagggccccttggtgaaggaagtgtttgggttcattccaatccaaaatgctatgattccaaggactgaccactgacaaacattttcctttgctttacattctcctatacataaattgctctgccaaatacaaagcagctcatactaaattgggtatccaagctgcataatatttgactcaaatttcataaacgctcaaaattttaagacacataaaaatgtagcagagattcatggtccgcaagtggttatactgctgacgaatcctaaaggtacaaacctggtaggcagatacaggagatgcaatatagggtgtaatagaagtttgagtgatcattcggtttgtagcaatactgtatggtgaaggataaaatctagaacaaacacaaaagcctttattaagtaatcctttaaatagaataattcatggaacaaatgtctgatattttccaccttcacattttccctcaagccattatggatttattttaacgacatacccgttctgtatagcagctgtagttgggtcgtaagtaagtgtcattccagcctatgggaaagagaaagaaatataaacattcatctagaaaggcatgatttaaaaattctatttttagccaggtgtggtggtgtgcacctgtagtcccagctgctggggaggctgaggtgggaagatccttttgaagcccaggagttcgaggctgtagttagctatgattacatcactgcactccagcctgggcaacagaaggagacccctgtctcttaaaaaaaaaggggagggaggggaatttgtacttagagtctagtagcatttgataaaattgggagtttctgttagtcaaaatgactataaatatgaaaattaatctctggacctgcactgtcccatgtgatagtcataagccacatgcagctatttaaaactacataaaaaatcaatctctctagcatactagctacgtttcaagtgctcagagagccacctgtggctggtggctgttattggacagtgcagattctagaacattttccctagacattcttggatcaatatgttattgtttttaaaataataattcatggaaagtcaatacagggaaatggacgtccaacattttattacgaaattgagagttttaattaaaaaaaaaactattcaaaagagaggtgaaaaaaaccccaactcagtgataaatgtactatttatatataaatatttagattactatttaggataacttctaaatattataaatataaacccctctaagaaaccatgctagcctgggcaacatagttagatcctatctctataaaaattttaaaaaattaggccgagcacgatggttcacgcctgtaatcccagcactttgggaggctgaggtgggtggatcatgaggccaggagattgagaccatcccgactaacacggtgaaaccccatctctagtaaaaatacaaaaaattagccgcgcatggtggtgggtgcctgtagtcccagctacttgggaggctgaggcaggagaatggcatgaacccaggaggcagagcttgcagtgagcggagatcgtgccactgccctccagcctgagcgacagagcaagactccatctcaaaaataaaaaataaataaaaaaataaaaatttttaaaaattagccaggagtggtggcatgtccctgtcgtctcagctacataggaggctgaggtgggaggactgcttgagcacaggagttcaaggttgtggtaggctataaccacaccactggactccagcctgggcaacagagaccatgtttcttcctttcttttttttttttttttattttgttttttttttttgagatggagtctcgctctgttgcccaggctggagtgcagtggcatgatcttggaacactgcagcctctgcctcccgggctgcagcgattctcctgcctcagcctcccaggtagctgggattacaggcatggaccaccacgcagggctaatttttgtatttttagtagagacggggtttcgccatgttggccaggctgatctctaactcctgatctcaggtgatctgcctgccttggcctcccaaagtgctaggattataggtgtgagccaccgcgcctagcctacagaaaccctgtttctgaaaaaaaccaaaaacaaacccaaatcacttgtgtttttcttatggcaatttagaatgctcttttacttcatgtgtagctagctggtaaacacagctgcttccaccacctatcggtccatctggagaatcactctgttatcaccatatataatgaaaagaattttaatttggcatcacttgaattataatgtaccgaaaggaagatttaatcctggcacctatttcagaagtgtgcagccaagtcaagatgcctttttgtgttacttttcatgtgggcattcaagatcacaccccctcccccaccccgcaaagtttcaagaaaggacttacaagtctcacctctccttctctatgccatggtcttccattagggatgtatttgtttgggttctgtctctttttctgtcctccatcagcaaacttacacaataaaggttctgtgggggctaagtaaacagagaaaaataaaatgaaaccacaatgatacgtgtatgtggatgacaaaatgtattacaaaaataggaatagtgttcacgctattagaaaattcatacaacactttaaggcaaaagcagtttactcagacctttgtaaaactgtccacgatgaaaaacatagtgcagaaaaacatactagttattatttctgaacatttaaataactattctgaggaagcaaaggaatctttcgattcactttcacacttaagagtagacacatttcttttggttttgggccctctccaattccacctctggaccgtcaccaaaataatcttcaaattcaataggattgtgccatcctcccctcccccaacttaaaatggtcccttagcgtcccattataattcctaagagggacccttcacttctcccagtagaaaacaagccacctctacactgctcgcacatatatttttattcacaatttgtaacaattggtgagtatgtttacttgcttggtgtctgtttccccttctaggctatacgccccatgggggcagtaacattgtctgttttgtctatcactgtatccccagtgcctaagtgtctggactttgtagttgcttattacatcttggttgcatcagtgaatgaatagaaataggtctcatatgtttatttttgggatacgtcagtgaagatggctgttgtgagaaagctaaaaatacttgtccaccctatttaaaggtttttctgtgcctttaatcatacaactgggtattgctttactatatatctatataccactatatatagatctgtatattattactatattacttataatatatattactatatacctatacatttatataaattcttcttacagaatccatgaggccaaaacagaaaagcagaagatgtagagaatattttcaaagatatatactcattagagttaaaaaaaaaaaaaagtctacagacagcacaatagggcaccagtaacttttccttttctttgcttttctgcaatggaaatagcagtgtattccagaaagttgtgcatttttctgtgtttctagttaatgtaataaaggcaatcacaccttcctgtctggttcccacattctgtcctttgtctactgtagaaccatgattactactttcaagttctgtttcaaagttaaataaccacgaagagaaaaatattacttgtggaaaatttactcctttctcctgtgcctcttattatcctaattcatctcttattttatttcatgattacccacccactaatgacagggtggaagcagtagtgtctttcaacacttctctgccaaaaaacaaaacaaaagaaaacaaaaagcccaactgtaactccttctgggtgagctgtctgggctgctgcctggcactcctttcttctttccctggtgtgaaccactctggagggatgggttggaatgccaactcacttctgaatgacaactggactatgggtatgacgagtcaggaacaaaaatgttaggtgtctggtgagactatcagcaagccttggcccagatctagagaggtttatccactgacatttgaggttgtaagatgttgactccacataatctcgtagagcaagagagaagataataaatttggtggtgctggtacatagtgggtcttctctaaaacgaggtgcttttatctagagggtttatgaaaactaggtcctagactgaaatttaaccttttttttgttttttttaaagaagttacttggctcagcaagtgatcccaactggccgtttttctctattagcataatttctttcagagacagtaaatgatcaggttggactcattctagaagttcagtgcaggccacctaaacaggcaggtgtgaataaaagcaggtaagcagccagaccctgatgcctgcctaagctcaacatgtgctgaatgaccaagtgtccccatctgtggataaggtgcttctaacacattttccttcatctagactccagcctgtcaaagaaaaaaaaaatctcaggtgacaataaagcctgctaaaaatgcataacaaggaggtaaacatcaagggagtgatgacatgtttgcaattagatcatttaaaataaacaaatggaagaggatatagctgaacctttcaaaaaatgaattatatttactacatgattctatgctgtcattaagctattttttccccgctaaaagcaaaaagggaagtagttacaacagtttgtatactggcaggcatttcatatcttaggaaaacaagctttttaagaattataaccagtaaaaatgacacatttctgagatagttgctggctgcttgtttcagggaaatgggagtaccccaatattccatgtgaagcaatataaaattctaacagctttcctctttaaaattctctttggtctatttaaccatcaaaattttaacttaatgtccactatgtgccaagtacacaagagctggggatacagtggtagataaaacagggtccttgcctccctggggcttgcagtttaatggagaaaagagtgtacctaatctcatgaaaacccatttagtcatttatggaacagagcattgtttttagaggtatttgttttcaataaaaatgctaaccagaagcaaaatacttttgatgcagaaacagctgtatttctttgacaattgctgttccatttatttgaaggacattattagaaacagcttctccctataagttcttaatgttttattcattacaaagattgtccatgtgccctaggaaagcaaattacatcaagatttaagaaatttttaggtattttagggtggcaaaagggcctgacttattgtaattgatatgtggtcttaccatgatgttgagcaagggttagatgatctgttagatttttgggtaggaaaaacaaacaaaacacactgatgtcatgacccacttatttttaagtgtgtgtgagcgtgttacaaaatgagagatcctcatttggccagcatctcctgtggcttctaccaaaccagcggtagtccctagtttgccttttggagctgaatatacaggttacaggttgaagaatcaggagatcctatgtgacagtagcttgttctatagagcgtacctttcagctgaactccaattgttttttacaagggagagataccggaagactgacatgcagaaaaggaagtgccataaatactagtcatatgactttgagtgatatgtaagtttggccaaattaatataaaaattaatatgtaactgtcaatcttctatatgcatggttacttttccagattagcaactttttaccttattctgcaaagcagtgattacaaataattctgacaaatgatttgtgatttaagatgtattcctgtgttaaagtactataaaaatgatataacctacccttaaatcaactgattttgccaaatatgcagagcattctaggttaaatttccccttaattagttgtgatcttttgggtttgtaaagggattctcattctcatcacccaaaactaaagagttattttcctgttcatcagaaccaacaggaacatgcatctccaacagcttgacaactgcagtgttaccttgagcatttgttaaaggccccaggcaacactgcaatgcaaacactgatctaatattttccggcatctcttaagagccatctaaggtaatcatgtcactggattctccagtgtgctctcaacagagctttgagagtgggatggtctcttacacaagcttgattttgtggtactgacaatccttcctgagactgtgagctccatggataaggctcaggctgacttgctgcccatctccaccgagtattttccttaccgatcttctgaaacttaactctacagtgatttgtgctccaatgtctttctttgatatttgtactaaaaaatcacttctagaatgcctgctctgagtaagcactgtagctcatgatgagatctgcaagtcctcctcacttatcaaacagcttggaaggacttggagctctctagagtttgtaacagaactgatcttttcctcagcaggttctaacgaaggtcttctccgtgcttttccctgtcagatgctgacagcagttaacaggtggagaaactgtcacttccaaacttccatctttctagttatgctgtattttatcctaatcaaaacactgtaaaatgtaaactgcccttgatagaagcttccctatccactgtggaaaactagtccactcagcaactgtaattagctttctttctgataatgttggctactttcaacactcctcaactcacaaaatgcaaggaactagctgctgcttttaaaacatttcaataaggatccaataaatattatctattttttatgggcacaacatcgtttcctgttttagccctctccttttctaactgaattctgttgacctattcaaccactaggaagagctacagcttttctctgtggacgttcttcctcccgaggctgtttaggtttctcctcctcccctgtgccttaggtagtgtttctatctccaacccagtttgagaagagagtaacatttgtaatatcgtcatgttacaatcatgttacctgattatatatagtcatgctttgctcctgctgggtttgagttttcttcttattgaaattctccttcacctcacttcccaacccatcaactaagagttgtttatcagtaaaacaatgatttgacaatattaaagtcatgttaaatacaaaacaaaaactccatacctcccatgactccaacaaacatcttttaattttctatatttactacttttctaagtctatgtagagccatttatttttcacatttgcaatgataggtccttttcttctaccatttatgttgtgggtccttctctaccttgtttaatggtgacatagtattttatttgcatagtttattattgtaactaacaccgcaggaacatctgtgtgtggatcttaatcttttttaattccagtgccaactgctatagtggtgggtgtactgtatggtggtattctaaccagtattctaactggctcataattagtctccaagggtttaaaattctgcttttgtatttactagctagtgactccgggaaagttattcaatgtctctggtctcataatctctgaaatggggatgataatagtgcctacttcaaaagattgttatagttaacataataagtgcttagaagagctagtgttcttaactactgtggcaacagggggagctcaaacttttgaattatggctcctcctcttgttttcaaatgaagaaaaattctcaggagagggacacttctggttcagaaggtctaaacacttggggactggcctgttatccatgggatttgaatctgagagatttaaggagctggctagagttgctgccttggcttcttacagaatgaagaaatgttgaagttatagttaaggataaagttactggtcaatgtcttttagaaaactgttacacaataacacctacaacttctacccaagagccttgtgctttaataaaatcttactccactatttactcctcactggcagaacctgatcgtgaaagggtgtaaaatgttgatttgtgaggctggctgtaggctgggtgtgatcgatggtgataattgttgtaaggcagcctcaccataagcctggtgtggggactagaacactggcacatctcaggttgtgggcccctgtcactttttaaaaactagtcttctcctcctcagtaggaatgaatttgaattctggatctgcaagaccgcccttgccccactggccacctaggcctgttccagcgcttttgctgtcacgacaacaattcttcttaagagtatagcccttgaaaggtacagctcatgatgctgtgtgagttcagatccagttctgttttatgtaccgggtgagggagatatgactgcacatcctgaaggtaccagggacattccacatgtcttcaagtatttcttttgtcctagagctaccaaaattttctgtttttacagggtaacaatgcttaagagaaatattaagggaacaaaatgggcaataaaaacctttgaaaaatctccaggccttttactagattcataattttccctctaaacattatcttttctgctacctggcataggacaatgccctcataatatcactatacacacagagttatgaaatgtgggcaagagcggttttcaagccccactggacacataaccaattggaaaagtcagagtaacacagaaagcagatgtaaaacaagctgaagcctttgaagggagtctgccagcagacacatatgcacttcattgaggctcctctgtgacaagatgaagctgtgagcgatgtggcagaatgataacagtgcaacactgagaatctaacaggcattccctgcccttagcacacagggacttattcacactccattaatgtcatggagaggttcagaaagcgagatgggaaatcatactgtctcctgcagcactgaacacacagttagcctttgtctttgagaggtggtggtggtggcgagggggagaggtgtttgtgcagggagtcagggcgccagagctgttctcagctctaggatagttccagctcacatgccatacgcattagtcttctcaaagactgtactctcttccaggaaggtcctagaagagcatttttagacaaatcactgaatcatgatcatgtgtttcagtgtttttgcctgaggcatgtctcctaatttggacactggttctagataactaaaacttcccatctctgtttctaacattcattgtgtagaaaactgccaccatactatttctgcataatggaatttttatcaagcaagtattaagtggttgtggaaaaactcgatggaattcacctagctgtgtcatgaagaagccatgggttcttttaccctggttggggacattccatgtaaatctgacttaatacaaacaagccacctccaatatttcaggaaaaaatgcaggactgggtggggaaagacagaaggaaaggccacataagcaattattttttcccccaacaaactataatatacatttaaagaaacatctgctataagaaaagataaagcctcttttaaaatatagtgacatcagacacaaaagcacaagattttaaaagagcatttcagaaagcagacggcactagaaattgtgatgtggtacattagatttttacaaaactgtaaccatgtgctttattatgtgccatgccccaggccagagtggaacatggctggcatgagggacccagccatgccactcgggtatggaaagaatatggtggcaggagggcaggcagtgtagaagtgacagctcatgtgcatagctgacttcctcctgcttagtcatctagagacttccttaagagtgtcacagctaggatgagttcattgttcagtttgttcattttgagaaagtatctttcgggaattgtgtctaacgtgggtttcttttctgtacttggctccaatgtcatgggcaaactgccagccatgcaagaatccaagtattctgacaggaatcatcccagataattctgcttacgccagctaaacaacttgcatcattaaataaaccgtcttctgactgtatttatgaaatgttatgtctacctatcaatgagactacattatgcaaacattcaagtggaggctcattcaactgacccctgcctgacaatatttttgttttttatctggttcttctgataataatcatatgccctccacagagaaactgatgctatggagtaaccattcaggggatataaagaaagaacagtatctaatacacaaactggtactcaaaagaattctgaagtcaccatgtatacaagaaaaaaaaaaaaaagaaaaaagaagtctagagaagttgaaaactctttcacattctttgtgggttttcaagtctactggggacttgttttggaaaaagctgaattcactgtgccagtgtgcttccaagtctggcattatacatttaacattcatgcctaaaggcaatttaacctcctgtgcaaaaaggtggtatccaaaaaggccctcaaattagcaataattcttgggaagagctctgcatgaaaaatgctcttagaaacctgttggtaacttctggtggtagggtgatgcacaagttccctgagtctagcacaaaattaaaaagaaaacatagctcctgcccccaaagaacatgcaatctaattgtcaaccaagacttacacactcaaaagatcattacacattcaaaatggcacaaaattaagtgctaattcagaacaaagtgaacagcttgactgaaaaactgtacccctgcagtaacgctctcaatgtaaaaggaactaatctgtttcttgtgctccatttgtaacttggcacagcttggaagaaattactctttactagctgtgaaggtgaagaggatcctacgatcatttacatgtggtttggaaatctagggcttttatttcccttgaatggatgtgaccaatagtctgcaaacccccttcaaagaaaacaccaatgacaaaaccacgaagttctttagagaaaaaaagagactgtctaaccttgatctgtgacaccctgagatctactgtattcaaggaactgaagagcttttgttgttattaatttagcaaaccattccttcaacagggaagatcttatcttagactgatacaccatcaaaacaaaagtgtcctagatgtttttccttctcaaactttccttgttgcacacaagaatgagttaaaaaagcaaagaggtcacaagtaggtggatgaataggtggtcacaagtaggtggaatagtcccttcaaagggactaatgtgtggggccctgctcgtgcaaaggctgacaccgtaggagcaagaaaacgccagctgggcacaggtgctcaatgccggaggctgacagggtagggtttacagaagactcccacgtacaaaatttctcctttgtctttacttgggcagaagttaaaaacattattttctctttccattttttttcaactctactgatgttgatgggaaaacaatactaacttaaaaaacaaaaaaaggaatctcttccactagattgagtttcttgaaataattacttccaggttttatattttatgctccaaatttgtgtatgtaagcagttcaacttcagatacagtcacagatgcagtgtgctctcaggttttagtattacaagatcaggtgtagcctgtggaactgcacatacaaattagtttctctatgaaatgaaaagcaactgaatacagaaaattaaagtgaatttctaatggtaaacatcagtcatctagctaaagataaaacagtggagctacggcggaataaatactaaacactagttatacgtgcacagccttggagaaactgctctcttccatgacttctggctggaatgaatctaacttcaaaacacctcaatgtttcttggctgtgtctcatgtgaaaaactgggataaatattctatattgcctctgtgcttgctttcaagattgggcctgacctgtttttttatgttatttaataaggttcaattcactgaatctattaacttcagtgtgtacatatttttgcatagaaaaagtggcaaaaatctgtgttttggcaaatggggcactctgttctaattcttgtggattctgtggcagttgctcactttagagactcctcccccattcagatatgagcaccagtgtctgctctcccagcctgagtatttgggataaatcttcttgatatggtgaacccacttgacactccaacaaacaggtggccagggtagcagttaaaggctccctctccagacctgtacccaacactaagtgaaacctcaactttaacccttgggcatgcttgggcagaagctggaaagtaggacttttagctgacatggacctaaggctcaaagaagacttgctgatctgggatacagattgggaagtagaattacagatgcattatgccagctaaacataagatgactaaaattacaggggagaaagatggaggagggtgtatgtggctttttttctttttccccattttaacaatttcattacctccccctcaaagcaaggtgatgtggtttctaaattttgaaactttctcctttctggcaggtggcatgctagtggctggctgcaaatcagatcagaagacatttcaatttccccccacatggtagcttgttaagaacatggtattggcctggtgttacagtgtagtaaaatttattcaaaaccaccaaatatttgttgttgcatagtatggctcaaaagttgtggtgggcatgaaaataaaaagctgaagatacagtttctactttcaaggagcttctagtttagtgggactgacacatgtaaacatgttaagtgccacagcacacacggaggtgtcctcaaggtgatgatctgcagacacagcataacccaactgggtcagaggaggtccttgcagggagaaggcaagccctgaacacagtcttgaaagctgaggaagagacagccaggctaaagggaaccaaagggatctgggtcattggaaaccatgagagaaagccaagaaaaatgatgcagcacgctgtgttgggaataccatttgtagttcaatgttggaggaggataagcaggaaggcagaggatggagggagacaggactgcagaagtaggcaagggctcctgtcacctttggctttccatgccattccaggaatcctcaatctttccttctaactgagagggggtcgatttttaacaataaagtgacacataggtatatattttatctaagtctctctggctacagtcagggagaataccttagagaggtaagaagaaatagggctgatgcaatggtgcagatgagagatgatcagaaattaaactaggcagtggcagaagaaagggagggagaaggtagattctagaaataatcagaaagaaaaatttggggacttgaatgattatttgtatgtgagatacaaagcacaggggaggtaggggagtccagtcctgggtttctagcttgggagtctgggtagatactggttccactaactgagagcaggaaaacaggaggaagagcagaattagatgggaagtgaggtaagggggactagtgtagttctggagaggatgaatataaggtaactgaggtcaggcagtctgaaactctggggaacagccaggatgagagatgaatgagagtcaatgactatgaatataagtagtagttaaaaccttgagagtagatgaaattatcagaatcctgagccaaaaaatggaattcaaggcaacactaacaattaaaagcagatagaagaaataagtttacaaaagagaaaggattaacacaagatgggaagaaaacggagacaggtgcaaaagtagtcaagggaggacgcacttcatggatgagtgaggggccagcagtcccaaatacatacagcagacagacacaggataaaaagaggggaaattctccagatggggtaatcaggaattaagagttacaggttgaactgtgtggggtcctaacacccagccctcagaatgtgatcttacttagagacaaggtcatcaaagttaaagtaagatcatggcgagggggtaggccttcatccaatatggctgcggtcttcctaagaaagggaaatctgggcacagagacagatacacaaagagggaaggtgctgtgaggagattcggggagaagacagccatctacaagccaaggagagaagcctgaaacagatccctcatagcctggcttgggtgtctgggtagaaggaaccaaccctgctgacatcttgatcttggacttctggcctccagaaccctgagacactaaatttctattgtttaagccactcagcttgtggtactttgttatggctgtctagctaactaatattgcgcatttaccaagaggaatttcaaccacacaccagggaatgtcagattggagagagtgatgcataaatgggaagtaaggaagtgaagactacacttttaaatgttgacatgagaaggtgctgtaaggaaccagagtgcttagtttagtttctagattgtaaagacttaaatgatttcaaacacaaatggctatcttcttgaatatttttggcatgaagtaattcatagtttttgttcactgaatcctgtgatttaaaaaatgtctattgtagttatgttcacaagttttgttcctagtgttacttgtttgcacgtttccccccatttcgtcaccaattagtcttgctagatatctattttagtaactgaaaatcaaatttctcggctttgctgaaaaaaaaaatgaacaaaagcaaaagacagagactgaaattataggagagcaaggcaatgactggcagagcaatgtctcaatgagacggcacctcaaggacagcttcgaaacccttgtacatgagactttaagaaaggggactgataagactggatgtgggtgtaggtccccttgctgggagagagcaggaagctgacggagcttctagctggtgatttcaattttattcatcaagtaggaagtgaagtcatccacttgagattagggagggggttaggtaggggactgagcaggctggggaaattgagaactgctgctagggaagggtaaggaagctgagtgaggactggtggtgctgagcaattgattaagctgaagacatttaatttgtggtagtgccaatctttggctgcatggatataacaggagtggtgtgcgtgaattacagcaggattaattcaggttcagcattctgtcatgacagtgtgaacaagggatggggtgcaagaaaaaggagaatgccacttaagaaatgattttaacactcaaaaatggagaccagacttagtaggaaagagaaacaggtaaaggaggatgaataaacagtgaaaagagaaggatccctttgtatttcagatcagggtttgtgggagttagagtaagtgtgacattggaatgaaaaacccatgaagtgtggtgttcttggtaatgacaacacaatgtaaaaccatgggagaaagtggctaaagtggagtggacataaaggccataggaactgaggtctaggcactgctgggatagaaaggtaccacagtgctcaacggatatgatcaaatgaagggaggttcactgaggatggtgataaggtggttcagaagctggctgctgcatcaaaagaggagtgaattgcacaatgctttacaagtcagctccttaccactgcttccattaacatttaaacatccaatgcctatgcctagggagaggtgaatttttaagtcttatttctaaatccaacaaaatgcatcttaaagagtgaaatgaggggtttttgttctattgaagagtcatcatgtgctaaagttaaacatacatcatatagaagactactgatgaagtttcagacaaacaacataccagaaactcctggtggtgtcttaataaattttccattaaaatgaccaataacagcttcacatttttctgttgattccatcctatttataataaaaatagaatacataaatatttaaaggtttcttaactttcatcttgttcggtgcatgcataaacattcttataggttttttggatataaatgaaacctagtaaaaatgtgaatatgataaagggtctattctaccttttatctaactgctgcttttgtacttctatagtaaaatgacaactgataacaatagagtatattctgaagcaaagcaagaatctactgagtgtttaagatcaagtatatcaaacggataattttattgtaattgttgtaaaattgaaaaatcaatacacaatagctttgttagccataatagtgaattgcagatacaacagtttaaaatactagggtattttctacttgctaaaatactagtcattttaaaattgtctttgctttcacaaattcacaaaatgacagactaaaaagtcatgataacagccagtatcagtgagagggtgcgccttatatgcttcttacatttgcttcaggtttaaaattaaattagtgaagtcaactatatactttctttgtcaccttggctttggaggagtaaaggctggaggctaactttacaacttagtcaattcctataggtggctgaaagtatctgagaaacattgctgggaacttaaattacttcaaatcatttttctttaatggatgcaacactgaataatctactaaaaacactctatactcctggactactcagagagttacatcttagttttaacaaacagtgatagtttcaaaaaacaatgtaatttaattgaattctctctttggatacagaaatgatacgacttgatctgttttcagaacacccacagaggtgacaaaatgatgctgagctattcagtgactcacttgcgtcattttaacaagtggagcacatgctggagatgctggccttggtgacttactactcataggatgttttagttttatgataaaactaactggcctgacagaaacagcaatgaactaaaatccagatgaaccaagtactagcccctgcttcattatttggcagttaggtaacaatggaaaagttcccttttttgtctcaattttcttctatataaaacaacataataataatgctttgttgatatataacaggtctgaggtaagatgtgattgtcatttgtgtataaaagcaaaccctcagaaattcttcctacaaaatcaaagtcattactttaaaatatatacacattatttgttattgcagagtattaataagtttctaattaatgcatcatataaaaatcagcttttatacatgggcttttagattagaattctgatcaaaatcaaagagctttctatttagtatttttccatcagaaaccaaaataaccactactctgaagtgttttttttctggggagaaaaagataaaaaattagatggaaggagtgagggcactttagctataactagacttttagactttttttttttttttaaagacagatctgtcacccaggctggagtgcactggcatgatcaaggctcactgtatcctccaattcctgggctcaagcaatccttctgcctcagcttcccctgcagctgggactataggcatgtgccaccatgcctggctaatttttaaactttttgtagagaaagggtctcactatgttgcccaggctggtctcaaactcttgggctcaagcaatccttccgccttggcctccccaaatgctgggattataggtgtgaaccactgcatgcggcccctagaagattttatttatttatttatttattttaagacagtctcgctctgttgcccaggctggagtgcagtggcgtgatctcggctcaccgcaacctccatcccccaggttcaagcgattctcatgtctcagcctcccaagcagctgggattacaggtgccttccaccaggcccagttaatttttgtatttttagtagagacagggtttcgccacgccggccaggtaggtttcgaactctgcccgcctggcctcccaaaatgctgggattacaggcatgagccaccatgcctggcctaggttttatttctcacaaaaaaaaaaaaaaatctgaaatagaaattataaaatgttagtatttgtcatatctgtgtggtggttacacagttatcatgtccttgtcttacttttctgaatgttttacatatttcattttaaaacctaactcatttactttattgatgaatcaaatttccatcgaataagaaaaaacatactgatttatctattgaatttaggagactgactgttatttttaaaaagttagaagcatcctgatgatctaaggacacacacacgttcagaacttttgctcatgtgatagttcctttccataaggacccaaatatttagtgtgctcagcttcatgaattctaatgaacttgcaaaagatctggaaaaatgcagtctggtatttacacataatttaagttcacagtgcaactgctcccataaccctagctgaaactgtctcttcttagtcatttttaattttccaagataacttggcaaagctattgttgttgacataataaagactgggcagaaggcttacctagcaaagccaacaccacgacttgtaccactggaatcacgtagtatccttgtagaaataacttgtccaaatggtttgagcatattttctagttcttgctcatccatggagagtggcaaattagaaatgtagaggttggtaggatcttgttcctgttgctaaaacagaagagagtgttgtccattaatttccaacagaaggtgagatatttatgttaacacacctatttttattagctactttctttgctcaagtccttttaaagtactcagaacctcagaacaccaaagtcaccctggactcttgaaaatagtgtctgaagcttggacaatctgtgcaggccagacacgatcccaccaagcccttcttagcagatctggaaatggcactactgagttggagaggatgccctcatggaaccacaactctcagttgtttgcggtgtttctaaaaataactgacctctcctccactgttatttttaggagtccatttcaggcacactattgcgcaggaagctattatttcaatttaattattgctaataattcaacttagagatacatgaaggattctggaccaagtcatctagcatccaatagggatctgcctaaatttccgtcctctgctctatggcaaagttcacactacttttgagtcatgatcaccaacagtaaaaacaggtaatttaacgaaaacaagaaataacaaagccgtataaaatagtcaattctgggtagggaaaattttagactcttggaaaagctgaactcaagagtagatgggaaaggaaatactttgttcagaggacatggcattgacttgggacccaaagatcaagcagaagtcaagaggcttgcaaaaggctatctaaggagtttgattttactttgtcagtcactactgcttcagctttcctacttaagcagtgctaaaagcaaggagaataattatgtaactgtaggcaaaaggcaaggtagtcttgccagagctgcaaaatgttcttgaagtcttgtgttttatctttaaaaaaaagtcatgtaaattttgcaatctacttcctatctaagtttattttaatagagaaacaatgtttttgacctaataccagtaagtaacaccgacactccaggaagataagccatgcttatcttgtgatattacgcacatgagctgcataatgacatttcagttaatggcggatggcatatacgatggtggtcctgtaatagagatgaaaacttcctatcacctggtaatgtcttgatgatcctgacactgtgtagccctggctaatgtgtgtgttagtgtcttagttttttataaaaaagtttagaaaataataaataatagattttaaaatagaacaatgcttatagaataaatgtataaagaaaatacttttgtacagctgcataatgtatgtgttttaagctaaaacacacatacttgacaaaagtcaaaaacttaaatttaaaggtttataaagtaaaaaagttacaataagctgattcattaatgaagaacaaaaatttttctttttttgagatggagtcttgctctgtgccaggatggagtgcagtggcgcgatctcagctcactgcaacttctgcctcccgggttcaagcgattctcctgcctcagcctcctgagtagctgggactacaggcatgtactaccacgcccagctaatttttgtatttttagtagagatggagtttcaccatgttggccaggatggtctcgatctcttgaccttgtgatccacccaccttggcctcccaaagtgctgggattaaaggtgtaggccactgtgcctggccagaaagaaattttttaaaataaatttaatgtagtctaagtatacagtgtttataaagtctacagcagtgtaatgtcttaggccttcccattcactcaccactcactcactgactcatccagagcaacttccagtcctctaagctccagtcatggtaagtgccctataagggtgcaccatttttatcttttataccatatttttactgtaccttttctatatttagatacacaaatacttatcattgtattataactgctaacagtattcagtacagtaagatgttgtacaggttagtagcctaagagcaagaggctataccacatagcctaggtgtacagcaagctacaccatctgggtttgtgtaagtacactctatgatgtgcacatgatgacaaaatcacctaacaatgcattcaccagaatatatccccgtcattaagcaacacatgattgcacactggtaggtgacggggaaacaggaggaagaagaaactgcagtttgaaagctacatcttgaaaaatagggcggttttggcggcatggaagcaggggaatgatatgatcaaacccatcttagttttgattttaggttctatcttttaataaagatggggaccccttaattaaagggcactaaaacactctttggacagagatatggtataaaaaatgttacagaagaaacacatatcaaaatattgtgaggccaggcacagtggctcacacttgcaatcccagtataggccaaggtgggaggatcatttgggaccaagagtttgagaccagcctagacaacacagtgagacctcatctcttaaaaaaaagtcagcgagatgtagtggtgcccatctgtagtcccagctatttgggaggctgaggcaggaggactgcttaagcccaggagttcaaggttgtaatgagttgtgatcatgctactgcattccagcctgggcaagagcaagattgtttctctcgtgtgtgtgtgtgtgtgtgtgtgtatacacatatatatggagtatatatggagtggactttctttttaagaatgttcataggagaatttgttatgtatgaagaatttttagaaggggatcgacaatgtaggcactaaatctgtgttttagttgcttctgttattaaaatattattaaaaatattacacatgctttaaagtcttgattcaacttgaaagtttaccgatgaggaaataatatttaaaaatgctataaatcagaatcccagaaagaactgggctcttaacccactctttgatatagtgaaatagagtagactaacgcaggtaagtatttcctatgatgtgaatgcatttgttttcaatagcaacgaccctgtcggttaaaaacctaatttcatttgggatgacctttagcgctaatgttatttatgtttcttttcaaacggtcaacatatcttacaaacattgtccacaaagttgcagtaatttaaaaaaaaaaaagaatggaaagaaactccaagctggcagcacatgccacaaaataacaaagtgtccatgaattcttttttttctaatcccttcttttcacgggtgttttttttttctttttaaattttactttctttttagttgttgtctatgcattcttataaccacacattcactgtgaacaagacatataatgcatgtgataactggtggtggttcttgaaatgaggatagtttagtatctttaaaagcagtgacaaccataactggtttattatttacaatgctatgtgtgaaaaaaacacttattctttcaattataggtgaccaaacataaaaatagggtcaacaggcctcctttgtccctaggcatggaagggttcaagggcttccataacaagtagaaaactagatctcacattggccgtcagagtgataaacagctactaacgttcacgtgagtagaaaagccaggatcggaagtcctgcacagcgtaaagcactcagtcatcatccgaaagaaattaacaaaaacctccccgtgcgtgtggaatggttcctaaaatgcaagaacggggacttggcagtaagagcagacatctgttttctcttgtacagaataggttcaacaaccagcagatagccagtcactggcatgtgactgcaaactgctcagagcatggtgaagctctggatggagaggggggattatattcctgctcgtgtgactgcctatttattgaaaaaaaaaaaaaaaaaaaaagtgtaaacttcccaacagccaaaaaacatatgaggatttgctgacccccatcaggccataggaggaaatgaaaggcctacagaagccactttgctaatagatataaacaatgtccattagcgttttctgtctttgtagctcgttatctgcgtttcttttccttttatagaatgtgagtcttttatttgaaagatgtacacatttgtaacatttgcctagtttaacataaacaggttttccaaaaggcccaaggccattaggttaagtttcatcagtgtacttgatggatataattttaaactgtccctttcttaattctcaatatctgcccaagcttggaaaaaagttattttctcaattattttatttgatcatcaacaaaacaaacacttaaaacctgccacatggcaggtaccagacaaagcgctgaaaattaaaacaagaataaaaaccaaccactggtctctaatgctctcattttgcagttttgcaatttagttttgaatatttgtggggttctttttcaacttaggtacccagtatgtcaaacaatattatatttctgtcccatcctctaagtgattgcccttaatttttttctgattatataaagatgaaagactttaatatatggcaatatgaattttcctgattagttcattagaggagagtggaaagtgacgggtaccctccctatcacccaagcacaggggctggacttaaactccttttaaaaatcatttccccactgggtgtggtggctcatgcttacaatcctaggcaggtggattgcttgagctcacgagtgcgagaccagcctgggcaacatggcgaaacctggtctctgcaaaaaaatacaaaaattagccaggtgtggtagtgcgtgcctgtagtcccagctactcaggaagctgagggtggaaggatcgcttgaacctgggaggcggaggttgcagtgagccgatatcaccccactgcactccagcctgggtgacagagccagatctggtctcaaaaaacaaaacaaaacaaaacaaaacaaaacaaaaatcatctccctgaaagatgtgtttcaggtgctcctttatccagacagcataaaggggctaagtcaagtctagatactcaaactcatggttctatggtatagaacaataaacccactgacatttaaaatacctcttgtaactataatgatatcataaaaaagaaatcaggtctaggaatctcaagtcattctacagggacctaaagaaattcacaatatgcagaatgttggcagctggccagcacctctgaacctgagtactggtcctcgccacagatgatggaggaaggggtccttttccttagccaatgtatagtatcaagctttctaaagaggtctttgaacagtgctcattttcaacctgggggaaagctagtatttgaagagcgctgtagacacgacatatagtgccaatatatacccagtccagtgttgaataaatgcattgtaaaggcttcttcaaaacagtgtatagttaatattctatgctgcttaatattacaggcattgaaaatggtgcctaggtaagtgttcaggggccactctaactgaagcctctacattcttaacagattgctaaaatagaactctttctaattctgtttaaggggagaccacaaaacaatgggtgtcaggcactcccacattccagagtgagaaatcagaccacctaaagacagcctgaaaggcgctggctgagaactggtttgggacacttaactgactgctcacttcctatgtctaagagactggggagactgagagtgagcatttatggggagagaaacgctgaagcgttccaagtctcaccatgtgaattgctttcctctcaccatcagtcaagcaagagagggcgaccactcagggagctcgatctgtgtctcaggaacctgaatggatacaatagatagatgtctaacttaaaatctaagggaatcttcaaggagaaaggctgaaaggctgacaagtatggctgggaagtaactctctcctaaggatgactggcaaaggtagatcagatgtgggccacacaggtagagttggcccagggttgtgttagatcctcccaagaaggctgcttcgaggggaagaaattccagcagaaaggggctgaagatagaccattagattatcaggagctgaccatgtcaacctgaggacatgtattctttcacttcaaggagctataggagagaaagatcaatttagggaggtggggatggagttggttaaagacctcagaaaaccaaagcattccatgagagaaaacatcagcatgctgcctggctagaaaaatcaacatcagatgacctcactgtcaggtcatccttttccagcacaccatccctggaggggttaaatgaagccatggctagtgagctgaaggaagagtgagaaaaacacaagctttggaaataggaaagaaatgaatcatttgctcatctcactataagcttgctacttggagcagacctaatccagggaagggagaagcttcagctgaagattcactacatgatactcaaaatttttgtcaaataaacagtactggagtattaaattacaggcatcacacacacttaacatcataatctgttcctgaaaatcagaaattcagcatcaaaatgttaaccgagagcctatttcacattatgttaaacaggaaaaaattataatgtattacacatcagtcaaaatcctcaaccaaattttctaaaatgtaactattttattttcctatttttctataattccctaaaatgtaactaaatacactcatcattacatctgtctctgtatgtgtgtgcacacatataacaaatggttctgttggaatggaaacactgctgcctgatcaccaaataatacggttgtcagccaacaattgctttttaggctgtgatgtctctcagcatcagcaatatccaagacacacatcccttatgttgactctcagcagttttaaaaacatctacatatgagtctgacattctataaactgtatttgctatgtaacttgagactctgactgaaaatgtattgaaacatatgtacgcttcatggagtttggctatgaaaaattgaggcattctaccaaacacatatcaaccagaaacacctgaaacgaaagaagcttggggaacttcttgaaataacgacagtggctgcagaagtcgtgagacttgccctggattttatccaaaagcaaggagcttcagtgagtgcattattaatagaacggacagtgggggaaagaagtaagttgttttccgagtgtgccctaaaagtcctgcttatacaatgccgggttacccattgtttacagaaccagattaaacattctgcaaatcattatgcaacataggtatcacatagtcataataaacatatttaaaacctcataatcaccgtctttcaataatgtcacagagaatctctacgcgatggacaaataatctgaaaatcatggtgctcacatgaggccaggtgtggtggttcatgcctgtaatcccagcactttgagaggctgaggtgggcagatcacttgagatcaggagttcaagaccagcctggccaacatggcaaaatcctgtctctactaaaaatacaaaaattatccgggtgtggtggcatgtgcctgtaatcccagctactcaggaggctgaggcaggagaatcgcttgaacctggaggggcagaggttgcagtaagccaagattgtgccactgcactccagcctgggtgacagagtgagaccctgtctccaaaaaaaaaaaaaaatctatctatctatctatctatctatatatatatatatatatatatatagtctgtttattttaacttcttactctggagtttaagaaaatctaaagtaagtccaactcaatgcaaagttttaaaaatattaaatggcaacggctacttagaaaggtgattcctcttactaattactgaaatctttatgttgattctttcattcaaagtacatctctaccctatagcttcacactggtttttcaacatccttaaggtcctgggaggtaacttatccgcttaccagagtcctttaacttctatgaaccttcttatgtgtatgtaaatgcttctcagggaacaattacgtgctacaattcaaaagtagcagaagacagtataaaattactttcctctttacttgaagaagccagataatataaaagtattgctcttttaaaaagaatactcaaaagatcaaactgctgagtttcaggcttgttactttcctctttacttgaagaagccagataatataaaagtattgctcttttaaaaagaatactcaaaagatcaaactgctgagtttcaggcttgaaaatattttctgtagcaactgaagaactcaggttttaaaaaatttaattaattacacagatgtcttaataactgcactgtagtcagtaggtattatgatgtaatgcaaaattacatttgggtaataaagactgggacataaatatcagtttattcaacagagactcctaaatgtgtttggtgcataatggaatgtgtattatagaatgtaagcacttaagagatgcatgtcattccaagtgtgactctccttgttgagccttagctcttttaataaaaaggccatgcccgtttgaaagtggggttggggggagatgcacaagacaatctaaggtccctccagctttagaattatgactgcacctgaactagggatttagatcatgtaaggccaactttttcaaggccatcaagtctatctaaggcatcattacttttggaagagggtctgagcatcttaaactaactttcaggatgaacctaatgcaaagagaaggacacaatgactggctgatcaactccatttacatccagaaactgtgatattctaagtcaaaaccgtagagggaaactaccataatatgaaagttttcaagaaaaaaaaaatgtaccttatcataattaacatccatgtgtactgtgctaaaatatatattaagcatgaaacatggtctcccattttataatcccctaacattcaagcaagttactcacttgaagaaattttcaacaatattgctcatctaaaatatgctaaaagttcatcagaaataaattttgaataaagtcattatagaactactaaaaagtagatttatataccattaataatcaatacctaaaaatgtctcactattgcacagtaaaaatagcatctgtagcccacatgtgcattaaaactacttgttttattatttgtataatgtatgtgccagttatatatatttttgaaatagaatatgctatatgctatacataattatcttttgaaacatgtctagaagtgtattcattccctgggcattgacatttaaatttaaaaaaaaaaaaaacagtacagatcttaaagactcacaaatacctgattacctgagaaaatatgctgctatttctcaatttacttatggggttacataatttactatgtaaattttatatatttataaatcctccttcatagattaagttacaaggaacagtcctttgcacaatagtgactgtggaggctgcggaggcacaggacaagtgtccagaaggcgctgtgctgagtgggatgaaggggagattacagatgcagatagaaaaagcagacctgtcgggcttcacaaccaaagctgtggaacagagaagcaattgctggctctcaactcacctttgccatttgagcttgaaccccactggccttcagggcagacacagctttttgagctgctgcagggctgtcaaagtcgacaaaaccataacctgaaatgcaaaaacacacttagtatttaagccattattctgtggttaggtaaaagggtaaaagaacagctctactttgtttctggtgtgggcaagagacatgaaaatgtcctgagggagctcaggcgttaacagctgcaggccagtggcctcctgggcccttcttccctgtcgtctatcaccagacagacaagcctgccttcagagggagttgggggagtaaagaaccagcgtttccctattcaagatcttacgtgtcttgtatttactggtgggggggagacatctaagttgccaaccaagtttaaaaaaaagaaatttaaaaaaaaaggaagaaaaaaaataatcaacttcagggaaatagcattttaatgattcggtaagaaagatggagacatcctacagagtttacaaatgacagaaacaaaaattatgtttattttgtagataaacttgtatttttaaaaatttgaataagtacaactattagacacccccaatataaaataatctaaagtttagtactcagttaaagatatcatatttattttcttaaaatacagctcatcacaccccttcaaaataaagaagagctggggaaaatgcctcaagacacctaaaatatgttttggcagttcatgttctaaagtctaaaaacaaaacataacaaaacaaacacataacctccttagagatgctctggttcaaagtttccttatccatagctttacaaacatttttaatgagctggtcatctgtcttcccaggccacaacaagtcaaaagcagaaaattaggggaaaaggggggctggggtgatggcaggtctgctacaaagtaagtatatgaatggcatctaacagtcaaaactactaacaagcaataaaagagaaaaactatgcaaagaataggacttacacagcataagcactaacagcctcatgaatctcaacagatcccatgagtatcaccgtatcaaaatagagaatcacagacttttcactgtgataattcttaagttattgagaaaagggtcaagttatatttagtagactaacgaaacggtaccaggcaaaataccagagccttccatggaactcaaactaattgtaaatgaataagaatactttgcaaaagaaaagcatcattggaaggttgtttagaagaggagctagccctatcatttacttacagaaatattactaagtaatatttctatctaaattagtagtaatttagatagtatgatactagtgacaaaatcaacatcaataaagtcaaacagaaagctcagaaacagcccaaagtcagttttgcagtattagtaccaaaaatattgcctggtaacgaaataagttataatgagatggagcagactattgactacagaaatagatgtttcaggagagatgaatgttaaagctgaaacaagaagcggcttccttatatattacttggaattgggctgaaataaggcttaatttgatttagacagtagagaaatagccaggctggagagcaaaaggaagaggttgatctaggtaaaacaaagaatgatactcaactaccaggttagaaataaggttaaacatatcttggatgtttttttagacatctgttgtccatgctaacacgcaacaaagctctgtggatacacacacaggcatgtacatgcacaaactctctctctctcatatagtttcagcaggtcataaatgagaacccagctacaatgaaatgatacagcttttactgatggatatttaagttttttccttcaattttgctattgtcaacaaattacagtaaacagaagatctcaattttgatgttattgtatttgaagttactatcaactcaggtaatatttgcattctgttatctgttattttcttatagagaaatccataatgcctgcattttagttaactgtttacatccttttctggcctttcccaatgcctaccacactatggctgttttataaccatttgctgaagacaaacataatagttaagtatgcaaccttgtgctctttcatgctgtctatctgtattactttcaagtaaatagaagacaatatacaatttgagttatacagactctatggatttgattatataaataggtgtaaagacgtttttgaaggcagggttcactaaataacatggcatcctctcactgaggcttcccaggagaattcctctcaggtttcaggaccaggaatagttatgttactcctgctctcctctcacattgtgatgactgaatcatggggcgagctatgttttctatttttgccttggccagcaggaaacacagggacatttggtaataacttaaagctgcctgcttttacccttatttttcctgttagtctaattcatcctgaaactatttttgctaatgtgtataagtattctggtcttacatgcacttctgtaagtataaataatgaatcaatcaatttcataaccaatcttttgtgagcttttctttttgtcctgaactgacatatttaccagcattggagggcttataaatgccttttgttggctaaactttgagagaaactgaaatgtaaaatagcaactgaattgtgaattttaaaatttaataacttaggtacatgttattctaatgtttccttcagcttaattctcttgaaaatacatgttccaaaaatatgttttgtggcaaaaaatgttctgtaaccctctaagatctctcattcccatatataaagtcctttgatctgcttaatttcaaaaaattagtatataacacaagtacctttcatttatattaatattctataatcttttatgcatttatttatttatattcatttatcaatcagtcatctatatgcctatctatctacctatcacgtcaagttatcttgggtaacatgttatctaactttatcatgagttaagtgttatttcttctcatttgtcctgaaattacttttttcttgcttctaggattttataaacccactcttaccctctccactcactcactcacccaccgtctcaacccaccagatatctgttgacacctattgctgggaggcttgtgtgaagcagagagccctggaaggtttctattactgcccacacacccaaaagcagtgtctcccaaaaaccactttaaaggaaggtctccaggagacttcttgtatctaaaataagttctgaattagtcctacccttagaagtccataaatctctctactatggacccttaccaactgttaagggtttgtattgtgacaacatgttagatttagcattagtttattttttacccataccttttctagatcacgtagagcactttgaggaattttggcttctatggaataggttgcttttggagcagagtgtaaaatagtgtggttttcagttcagggatgtggtgaagcattcaacctctgggtcctttcttttacttaaattagggcagctctgctttttaacacactgagccgacattaagatttcttttggggtggggaagaaaaagagaggaggtagggtatggataaaaccacttgtctactctgatttctctctagtttcaaagtgatgttggtgatcagcctcctatttttattcctgcaagagtctatttttctttataaaaccaaaagattttttttctgtgtctctgctctcccaaatcatttataaatgttaaataagactaaccttggaaactaagtatatgcatttcagtctataatttgactctctctagtttaattcatttaaaatatttattgggtaccactctacataaagcacgctctattcactgtcccaaggcaaaattgccttaatgtgccatgttgattaaacatgagcttagctatttgctacaatagctcctttaaatttaggcactttgaagaagagacagaaatacaatgaaccacttcaagtctagattaaaggaaatgcttggcttataaggagaggcccctaccatagggttcatttatgttctctgcctttttcagattgtgctaagccactgccccgtcaccactacttgaaaaactggggtctaattaacgaggagatttgccttctctgcctattcctgtcaacttatttcaattcatggggtcagtagttagattcaaagtcagctgactctattcttcccttttcctagaaatcacatgcctattgttaagatgctggatcattaaaagtcagaaccacagagcatcagtgctgcctactgtagacgcctcctcttccagctcatggggctggatgagctcatcctaattacatggaaaactgaaggtcagtgcatcaaattaatgcagcagcatatttcaaaggggcgcatgacctcccctccctattacaatttggtcagtgaaaatggttgtctcctccctgctgccaatattgtcaacaggcattcagcagagaacaattgggagtactgaaacatgtaattaagtactgcttaaaactactctattctaattaatagagccaatttgcacaatatgtaatcttttcagttctttagtacagtccaatggtcttcagtaagcagctctaatctcctcaggctcaggaaagaaaagctattttctaactctactccccttttaaaagcaagggctaaatgccaacccgtattttgcatgttaactctactggcgtcaaatctggaattctggcaaactgctagctgctgttgggtttgtagccaaaacccaaccagggacaaatgtaagtaatatgctgacactgtgcaagacagaaactgggtgatatataagatctggtttttaataaaacgaaggtggttttgaaaccaaagatcaggttttaaattccatcatttttctaaagctatcatttaccaaataaccagccaagaaaacatacctttgcatttgttcgttgtcttatccaaaattgcctttgtggagactattttcccatatctaaaaaaaaaaaaaaaaaaaaaaaggaaaaaaagaaaagaaagaaaaagaagttataaggaacccttattaatgcctaaatccaaagaacacacattcttttcaaacatctgcaaactttagagtacaaaattttctttactaagagacaggaaatgagaattctgaactcaaaactgaaaaaaagggaatggctaggcctcttgtttgaattgtgggattgcagtttgaagttcaactctgaagaaatcaagtacttacctgacaatcttaggacagaaacatgggatgtgggctctataccaaatattttcttctaataacagtatatcagtggtaaaatacaaagccaaatgcaaggttatagaattctaacaggaaagtactgtcctatgatccatacagcttttatgaaatagtaacagcggaaagctgcttgcattattctattcattttggttctgtggacaccattgcaaggctccatatcgccacagaagggcaggtgtgtgcgcatgtttatgtttagcacacttaatggtgtcaaacagatcctttttactgaggacttttataactgttcataaatacacttatttacaccacttgtaactcagtaataataattatacagtaaactcactttgtgtgcatgcacatgtgtctaagaaacggacaatcaagaatataatgaagaagaatataagaattaatcagggattaatcattaattttatgaagtttctatgagaaatatgttcaaattcctttatgtgccatagatgctggggaatataggaaaaattaagaacattaaaatttagcatactgctactgaaaacgaagcgacagtataatgtaaatatgaaccgaaccccacactctctccatagtggccatactataaggaaaagcactgttatctatgcttgccttctaaaaattgaggaaaaaaagttttgaaagataacttttaaaattgtttcttaaaaatcaaagtaaggctgggcacggtggctcacacctgtaatcccagcactttgggagggtgaggcggatggatcacttgtggccaggagttcgagaccagcttggccaacatggcaaaaccctgtctctactaaaaatacaaaaattagctgggtatggtagtgcatgcctgtagtaccagctacttgggaggctgagacaggagaatcgcatgaaccggggaggcggagattgcagtgagccgagattgcaccactgcactccaccctgggcgacagagcaagactccatctcaaaaacaaaacaaaacaaatcaaatcaaagtaagactctgggaaatgcatttaacttactcgatgcatctgagtctcacgtttcctcatttacagtctactttcctagacatttacttcaaaaattccacatttgctctactttaattttctcatgaatgattttgaggacaaaaagcatattaaaatttttaggaaatggaagtattttgtagcattttaaaccattgtgaatattacacacttgtattttatgcactgaaacaagctgaaatatatttatctagaagaaaaaaaaatggcttgagccacttctctccttcagttaatcttccttatgttcactctgtgtaatcatgtaatcaaatgattactaactaggcatgaaagtaaagataatttcaggttcaaatgacaattacatctaagaggcataatgctgcacaaacaccttcaattccctgttgagattctgagcattttaacaatattaacacagatcactaggcttacaaagaaataatctataaaaatctacaaatgagaaaaaaataagtgatctaaagacaacctttcagcaaccatctatctacctaggttacatgcttgatatttaccagctcctatcgtttgaatatttcacccatccaaatctcatgttggaatatgattcccagctgagcatggtggctcatgcctgtaataccagcactttggaaggccaaagccggcggatggcttgagccctagagttcgagaccaggctgggcaacacggcaaaaccccgtctctaccctcccaaagcacaaaaattgtctgggcatggtggtgcggggcctattgtccctgctacttaggaggctgaggtgggagggtcgctttagcctgggaggcagaggttgcagtgagccatgatctcgtcactgcactccagtctgggtgacagagtgagaccatgtctcaaaacaaaacaaaaactcccaatgttggagatcaggcttaatgagaggtgtctgggttgtgggggtggatccctcatgaatagcttggtgccatccttgtggtagtgagttcttgctctattagttctggtgagaactggttgtgcaaagagcctggtacctcctcctctgttttctttctctatgtgatctctgcacacaccttctcccctttgccttctgccaggagtggaagcttcctgaggccctcaacaagcagcaagcgctgatgctgtgcttcttgtacaaccggcagaactacgaaccaaataaaccttttcttttaacaaactacctagcataagtattcctttacaggaacacgaaaaatggacaaaggcaccaggactctctcgtgtgtacaagtccttgacaaaagcacttttagactgtatccctgtttcatacttttccaaaagcggggggacggtaggtatgactccaatttggggtaaggagattgagagtcacagtgattaagagactgctcaagctctcagagttcagggcattttgtaaaccaaacagaagaaaggctcatttaggagaaggaaggtaaagggttggccttcgacacttctagttctgctttcaacatttaatgatgggaaagacaggaaaatgcatggagaaaggggaatgaggaagtaggcaaagagaaaaggctcagtagtgctgaatgcaagccatgccacaccctctctcagcttgtttgctacatctggcatgagtccgctctgccagtgcacctcccttctctgtggcaggtactcccccatctcattccatctttcacagccctctttcaggggttctttgcccattcagcttcctcttctccctccttaactaagtactttcatcaagtttaatatttggtcttcaactgtttcttctcttaggaaattcattcagtgccatgtttttaattaatgaatctcctctgatgctgctcagttcttccttgtgtgtgtatgtgttttttttaaaactcaccaaagctttggtttttctctcttcctctttctacttaaataccttaatattttattaggattcttaaatatccagtgaaatatttaagtagtgaaatatcaagcccacgactttctaaatctcatcttcaatattatctcaaacatggctttccctgtctctctccatatctcttttcattcactagcactcactctcccaatctcctaccaagctcggggtcctcgtgccaccactaactcagtaattcctgaacccaggtgatcaataactcttccaaattttgtctttgatatgtttccaatctttactttctcccttcactgttcctagacacatgcaaaaaacacataatagttctccctgcatccagcttttcaaccctgtctgttgcattaatttaccttaaatacccctttaaacatctctccattacctattctacccatgcttgaacttgaagaacttgttcaaacattatcttttccatgaaactatcactaatctcttcaactatttagttggctattttctaagaaactagaaagggcattacatttgttgacttcctacttatgtcctagacactgtgccaggtactttgcatgtatgcttttatttaattaacttcacaacaatcttatgaggtaggtgttattattcccatttgtgcatatgagaaaacaaaaagctcatacaagttttgagcattacaccttgcctgaaatcccagagctcacaaatgagtaaattttcatggcaacttatcaatgaaatgattttgagaaacaatgccctctgagtatggaagaagaagggtaatggaaggtctgtacggtactcaaatattcattttccaagcacaggacattttttactcatttgttttaaacataagaaataaacacgtggcttatggttgaaagagggataacaagacagaggatggtgagtagaaaaagagtgatttctgacatttatcagttttactttctattgtggttttccttgcaagttgtggagtaagactgaaagactgtgatttcacagaacatcagaaacggattccactctgtctgtggggcagctgcatactggccttctgcaaacaagtggcacaggaagctgcttatttggatttacctaaggtgctgaagggcttccctttcctaaaatattcttcttttgggctgtccactcaattataccacttccagcacaagaggctcccattaaaatacagaccccagaactagaagatgcaacccttgaaatccgtcaggccctagctaagttagctcctcagtgggcaacttggatatcttattgtggcaatgcagtatagaaccagtagtttttgatgtcatgacaaaagagccaggaaaggtccagatctagaatatgaggaggagccatatatcaaatggcacctcagggactgggataaggagtgggagggttcacagtagtcatcatctctctctactcattttacttgcagtaagatttaaagtgaggggtgagggggagctgttatagacagttaacatttaatctaattctgttgtcaatcaccaatgcctgtaagagtaacagacatctgggtacaaattcataaagcaaccagatcttcacctccccttgctcctatctgtagcttaattttttttttttttttaaatcatcagccaggcacggtggctcacgcctgtaatcccagcactttgggaggctgaggtgtgcagactgcttgagcttagaagatcgagaccagcctgggcaatgtggcaaaacaccctctcgacaaacaatacaaaaattagctggacgtggtggtgcacgcctgtagtcccagctacttaggaagctgaggtgggaggatcacttgggcctgggaggcagaggttgcaatgagccaggactgcgtcactgcactccagcctgggtgacagagtgagaccccctgtttaaaaaaaaaatcactgttacggaatagggacatatgatgtactaggagaaacaggtctcctgactggcggaattcacactctaaggacactaagaaagtgcacgaccaaacagcatgatgtagaatttcatgaaagaaaaaaaaaaaaaaaaaaactgtgactatgaagattctttggatttcatctggcttcaaagtaactgggttagaccacagccccagctacccagattataatattctttgctagagtagataatccactccagagcaagctctgacagtaaaaagatgaagagtaattaagagacatgactatataataatatgaatttcaaagggagaggataacaggtaaaagctcatgttcaaacctcttggcccaagtgagcttggctaataaaaccttttacttagaatttactaaaacttctttagtttacaccacagttttactcatttctttctttccatttagatctcctctttcatctgctacaatataaaatgtaggtatatctcagtttgcacttagtatataaagcttaattttctcctctgcctctatcacttagttactcctaaattctacctttttggtaatttatattacaaaagaaacacaagcttattgtacacttagaagacaaagaaaagtaggttgaaaaattaaaatcacctgaagtcctggatatgattattggtgcatatcattatagactttatccactggcacgtacaaatgtataaacgtatgtgtgtgcgtgcaagcatgcgtgcgcgtgcacacacacacacacacaattttcctgtgtgctagggaacgtgcagcttttgaagagtccaggttataagccaaagctctggagagtggcgtccactccaaccaccaccaacagatggcgacaatggttgttaagttattttaatattggtcatttcagttgtaaattcatttaaggcacatggggtcatttgcagtgcttgtgctagttttagaatattttatgaatattattaaacctgaaaacacaatgggtgtgtttaaaacaacagtaaaaaaaaaagtgatatgtataaacaaaaaagatactttaactttgagaaagggcagaatgttgctcatgcatatagaatgatagttttcataatagctgctcctgaaggacaaacagggattcacacatcccgtaaaagacgctgtgcctatgtatatgaccataattagcaagtaggagggacaggggattgaaatgagaaaaagaagagaaaaataaaacatcaacatcagaaaacttatgacctcgtgagttaattcaggggaataataaaagtaattacttacaggtatacagctcctactctatgccaggcactattctaagcgagatgtgtgtgtgtgtgtgtatatatatatatatatatatatatacacacacacacacacacacacacacacacatatatatgcgccaattattttaatcttcttaatcttttggggaggtggagtattactcctactttgtagatgtgaaactcaggagcagagtcagtaagggacgtattcaaggttacacaactaagtagcaaagatgggaggtagaatgtttgctttggagtttaaaggccaagcatgttgacagctatggaaacttgggtcaccaaccacagactgtgccacagattgaaagtaattcccagtttgactctgcacacagctccaaaagagtaaggagatgaggggtggactccgtaattgctaaggtccttaagacagatgctgatgacattcaggaagaagttacctgactaaagaccttctggatacatgacattggtctatcttggaataacatgcccagtagagcatatacctcagtgagggggtcggcaggactggctttaaagcttaaaaggaataactaaggtatctatttgagggaaatgaatttgaggactacaaatctatttgaggaaaccccctcttgttattttggagttgctgggaaaaaagaaaaaatacaatacacgtcctcacacatgtacacacagatgaatgcagttttctaactcacttttttggctgctttgttttttcaatggcctcccagacaaaggggatttcctaaaacttgctttagctctttcaacagtggttggataggggaaggaacacaaagtatacattacgtctgtttagcaaataaagttttttggagaatgaggcctaaaaatagtagaaagggtcattacccatgttattctgaattctcactacctggaataattcagctggttatatttcctttatttacttggcatgtaaagtggtatttggagatgagatagaagatgtaaaaatttattaggcaatcaaaatcaagtaaattttatatgacatttacctcttttgccctgatgattttcaatgtttctacttccaagacacaaaaattaagggtatagaaagatattccccatttcatttggttgttctggcctaactcttacattagatagctgccccttccacttgtgttatatggctgagtgtacctttatgaataaaagattcctggtgtatgtagctggaattgaagccagggtttaaaggagaatgcttggcaagaaaagctactgcagacctaaaggtcagaaacaactgaaaaccaggcgctgaaggtgaagggattacgggaaagataagtacagtcaagaaaggagagatcaaaccaagaaatcaactcaaaaatatttatagcatgtttacagtatgccctttcaaggcctgtgaaaaatacagcagatgccacacctaccattaaggaggacagtcctttggggtatgtaaaaaacttttaatactaaaaaataactaaaaatatgagaccctgtatgatgtatgctaaataaaggaggcataaacatagagggaaggtcaagttgagtaagaaaaactggagaaaacaaaaatctaggtgggctctgtaggacaataaagaatctaatgcaaacctatgtagtgagttatggaaacttaagtctccaaaagtcttggaggactctgcattctaagaaaaggacagagagaacagaatgagactggaggatttggaactgtagaatgaaatcacaagagcaattattttagtaagattaacgaaaatttttgtccaggattagcagagagagatgccacattttatttattttcttgctttttgtactttggcaataacacttaagttcaagaaattacaatgagggatgacgagacggagggggtgaatggaaaggctctacagggcaggagagattaaagacaaaggatttctttgaagaagtcttaaatgcttaacttgacatctgagaaaaataatccatggtatctgtgcaatggaaagccagtggcttgtctctgtgaatttagaagatggggaaaaagaatcacaaagttcacttttctgaactgtcctggaaaggaaaacaatttcagctccagccacagatgcaaagcctgcagatttgaggtgatttagcagaagttcagacaatcctcatgtggtctaactctcagctagcctagctgccttacagcatgtgagctgatgaagactgaattacagaagcattgggacagttatcacattttttcaagagaagatacagacatctacatacctgatttttcataactttgaaattttcagatcaacacatcctttgagagtacaaatgaaactggtcatctctacccagattttgagactaataaccttttctcactaaattgagaatcattcctgttaatgtcttaccaacatgcctgggtgaatccattataaatagtatatgaaggtaacaattgatgctgtttactgtatgtataacttggactaaaaaattcatataaaacactaaaactatctcattaaaaatcgctaagatgcatttttttgccatagactatgaaaaatgtataacctctcttctaaataaaagagcatattataaagcatttgatttattacacagacttgctattatagtttagtatcaagtctattatgatctgcaatcaaggtaacgtagctttacattattttatggtcttttaagagcacattgcacacaaaaggtcatttacattatcttatgacaatatttttaccagaagtcactgtactacagcacttaaggatgtagtcacagatggccagacccaaattagtgctcccgagtactaacatgtcagaggaaaataatatgtgccgaaaatgaaacccagaattttgcaagtaaaatgtatattatctatcataaaaatgaatccctaaatgtctcaaacactgatgaatgtccaacttttaaagcaaaggcaatttgatcatagaaagtggccttctatttctgaattgaatttatgaactgacaataattatttcttaaattttcttcctctcccaccaaaacctgtaatgtattttctttgctttgacagtgtcacccttgtgtttatatactacttaactttactgaaacataaggaagacaatgttataatggaaagaagagagagttgccaccagagagaccatatcaagtgctgatatggccaatgggcagccctgtgactctggtgtagttagttgcctggcctcaggatcctcatctgtaaagttgtatgataatgtctccctcacagcactgttataaatgaccactatggtgcctgacatataatgaatattcaatgactaataagtgttattcttttctcccatacccttcaattaagggcacttctaattacttgagacttgagagcatttacctagactaccttcttaccctaatatcaatgtgatccaatgtggcaaaatattgagaaaagagagacacaacttttttgtaacttttcagcacagtttttttttttttcatattgtaacctctcaacatacattggtttgagtgaataaaatataaacatgtaatatgattttcccccaaaaagtgtttggtgtggggaattggcagcagtgaggagaagggaaatacattttgccttagaaaatgaatatgaccttatagtttatgccaatttagctcaaaaaatcacaggagggaagcaaggcaatttaggaacttaaaatggaattaaaaattagcaccctccccccgcccccaacaccacggaaacaaaactataaggggctggggtggggcggaacgtgtgcaaaaaacccagaaaagctttcgtttctaaactgtttttcaagtgtctctaaatttgtcactccttttaaagtaaatcacacaactggaaatcttacacacacatacacaaccagataactgtgtcagaatctgtagaaagtgaatgcattaaactccatcactgaaaaccataaatgactgcttcattcaaaacaagaacagcatgacagacagtaaaagtaaacatcctctctgaagcaaaacagagttatctgaagctattaaaacagtgtgcaaaattacctagaaatttctcttgattctgatacaagctaaaaaggcaagagtcaaattggacatttcttcgactgaacactaacgctggctttgatccaaaacactccaccagcatattgattttcaaacgtagtccatccttttctcaagtaataaatcctgactgccctgtgaccttgaaaagccagtctgaagaacagactgacaaggaaaatgatatctattttactcacttcagctctaaaaaatttggggataggatataaacatatccctagtaaaagacacacttggactgtataagcaagggaatgctaccacagcctgccagcagagttgacgtttctaaacttagacgtttggctcaaaggtcacttgtgacaatggttacagctgtaagagcggatctgatggaaaaggatacatagccccccgtattgatttcttactggtttgtctgcaaactaccctgtccttagatactgcagataaagatgagcaatcattgcggaggtaggatagtacggctccaaaaattcagaatcttgaaactcaagaaaatcagagaggaattatctttatatgaaaacacgtaactataaagagcaccaaatgctgtaaaattactttagtatcagtttctcacaattaccatatcccaaatgaaggtaaacatgcctcaccctcaatagagcttgaatccactgttttccagataatgatgttcttctgcttgtagttggcaagtgtagggtctgggtatggagatcagggctaaaagtgcttcttatctatatgattgtcagtaagcatttaccaatcttgttttgagaaaccttgcataataggagagctgttgataggatggcaaaatgctattcagattccttaaaaaacaaaaaaactagattctagaaactaaaggcagataagaccaatgttgatctgaggcaaaattctagattggattagtaaatagaaggtcagagacacttatgaaaagaacaagtactagcaaagtccttaagagcaagtcatgacaccttaattttagacttgtaacctccagaactgtaagaacattaaacttttgctatttctactttggggagtggtgagaaaatcagggctgcttaggaatgttacataatgtattctgatttgagttaaataaaaaaatcattatttgctcatacatcagatgaagaaacctgggaagatgaaatgtggcttgagtgagtgggtaactggatgaacgagtgattgagttgtcaactgttggttagcggtcatggtgaacacgaagggaggcatctggggatatgccatatagctctgttcttggccagcacttgtaaaagacattttaaacaatgacataaatcaggtcattggtggcacacttatcaaatatataaatgtcccaaagctcagggggatggtgaatgtaagatgacagaattaacacttccaattatttcaacaggctagaatgaatacttagccaaagtcaataaaataacattcactagggaaaaataggtcttatacataagttccaaaggggcaaaatcaactgtacaaatttagaaaaagccttggcttgttcacatgaaaatatgttttttttttttgtttgtttgcttttgattaagcacaagttcaagttcccagaataactaaaatataggttgcactgaaaaaaaaaaaatgagccgatcatagaaagacactatgctcttgggcctttctgctcaccattctccaacactcactgttatgggttgaactgtgttcccccaaaagatatgtggaagtcctatgccccaagacctctgaaggtgatcttatttagaaacagggtctttgaagatgtagtcaagttaagatgagtctctcagggtaggccctaatccagtgtgactattgtcctcataagagggagatgtgaacagagacacatggggagaaggctgcgtgaaaacggaggcagagattggagggagagattcctgcaagccaggaacttactaaggattgctgacaaactaccaaagctggaagaggtaacgaagcatgttcccccacaggtttcaaagggagcatggccctgctgacaccttaattttggatttctagcctccacaaccgtaagacagtaactattagttgttttaagctacccaggttgtggtactgtgttacagcagtcttaacaaatgaataaaactccagccagcttgcctgtatatcgctatacaggtccctgtcctgccctgctccaccttaatttcctgccctttaagattttccttcaccagggaaatttagcatctttctgcaagactcagtttaatggcattctctagcattttccgaccttccctggctgagctgagtgctgtctctgcactctgcccatggcatcctgtccacgcagcatcttggtgcagcaatcagcacactgctacattatctgcatggctgtcatccccattaggtgtgtgcccttggactgtgtgttttcctcctcgtatatgaggcctcagcatagtgcctgaaaataataaacatttgacattcagaagaaaggagtggaggaataaataaataagacagcctgttttcatgaagtgttttctacattgaatgcaattattctaaacatctcctttaacctggtcttctgagctctttcagaagagagtaagcaccataaacaaagagctagaaatcacatcctacaaggaaggaacagttgaagttcttaccgatgcttacctagaaaaggaaagactataaagcaggcctttccaagaactggagtcgagtgtttgcagtcactagaagttttctagcagaactagcctgggtcagggagggtgctgcagagcagggtttcacaaaaactaacctggggaaagatgatcaccactgtgtcagcagaaaaataggtgccatggatttgtcaaaaaattaagttcgattatgtacttctaatttttttgatagtgaaatggtctttctttttaagaaagagtgataaaagatggtggttgttggagtttgtgttctttttgactctatgctggatccctaaccctaattatttttgtttagtttactggtccttaaaatctaaaaatctaggaaactactaaaatatggtgggttggggatagaggctttgatatccctgctttgaaagaggactggacttcttgttgatacaagatgaatgtcagtaaatataatgattacatgtacagaattactgagtaaaagaatagcggcaaagataccttttaaaaaccacacctcacagcattcaatttattttaatttcaagttataaactgggacaaaaacgtcccaatacaattttgtaaaatcttgtatgaattgaccatgccacaaacaaaaatccacataagagaaaaaaaaaatcaaacaacagggggaggcatctgattagcttttctcctcattctctctgggattcagctgaagtgagcatgttatcagcaatgatgcctcctcacacttcctgtgactatcctgctgaattagcagaacacaacccctccactgccctgacttcctgcttcctctcccgctttgttcagggcttacttaactttgtatgcttaaatggtcagggtaaaaatgggtcctgaacatccatgcaggattttacaggtctgtcaaaagacccctcagagccaaaaaggagtgaatcctccaaggggagctgagatcctagtgatactagaaaatcactgaagacatggggtcaaagcatggaaccagaaagcttctttacatgacatggttttatatatatatataaagtatgttttttatacatatattttatatatataatgttttatatatataaaacatactttatatgtgtataaatgcatacacgagtgtttatacagacatacacatacactcatatgtgcatatgtctatacacacacatacataaaataagtataaactattttatactttaaagagtaaatgtaccagctctggcattaaaatgggattcaagacgtaaggcaacccaggtggaggtgagttcactctttgcagacctcaccccagaggctgctgggtgatgatggaggtgggggcagaaagggtaggtgggctttctttgagatcgagttgagggaaaggcagggatatgaaatgattatctctcctgtgttatttgagaaatatgtattataaatcatctatattgtgatcctaataataataattcccattctcttgttaggaacacagtatgtgttgtagaatggaggtacaataaatgatacagtcctgaagaaaacttatgtgccctttcccactacttaactgctcagagctcaacttatcaaaatatttgttttgttttacctgggtcagcccccaccaggccagcctgggacccttccacaggccagtccctgttccaaaccacatccagaagaaggtgataatgacctccttaacacccaagcctacactgggctcagtaattgctccaggcccctgcttgtttcctctcacaaacaccttaactcagaaggaaggcagggaatggcttgaagctgaagctcatttcctagacctaactccaagctcttcccaaaccacacaattcactgatggagccaataagacaggaacggggaaagtgaagtacaggatgggtggtggagagtaataagcacttctaggtccattaaatgaaaaatcaaatttccttctagtggctgagcataaaacagaagaaacaatcatagaagaatcagagagatgttgtgatggaaactcaggagataacaaacccgtttttctaaaaccaacaagtacctcagagagatgaagccccataacatttcagcatgaactctagtgaacttaaaaaaaaaagagataaaaagtgcattcattttaaatgcatgaaaacatgagtggtacagcacttattctagtaccacagacatgagatgcccatatttataaatcctttttttgacaatgattattttgaaaactcagttctatcaacattttcattctttctaatgaggaaatcctccatcaatgttcacagagcatttatctatagtacttaaagatttccatttagctgacacaacattatgtaaggagattttgcagaaaaggagaataagatgtagtaatgcattttaggtgctcaacaaaatatttttgagtaaccatatgagctaacagaaggagaatttgttatttctaatgagtttagcaatgaatatgtgggcagtcagagtaaaaaccaggagagagctatgacaagtacttgacttctatgacaaagttttaaaagtactgtcacatttgacacattatctcatccaagcctgcggcaacctggcaaaggcggtaccattaatcctgttctacaaggaaggaaactaaggcagaggggacaaatgactcatctttccccactgcactgcagttgaaagaaaccagaaaataaaatcaggttatttggtaggtcctcagtaacgagtctgagtcaggttccactgaagctctttgagtagccacttccagtgactatgtgtgttaaggaaactgttggctaagaagggaagagatcattaccagagccaagaatggacccgagccaggaggaatgtatggagccaaggaaataatgcaacacagcccccttctttagggagatgaaacagaaaaagttcaacctaaaattcaaccctttagtcaccattccaggctaagtttaaatcacaagttttaaatgtatactaatatgagtagagacttgaagtgattctgggggaaaacacaacccaaaacggtagtttttgagacaaacacttaaagctataatggatacctaagattttatcctgaaatgtgaaaaaaaaaaagggatatttatctcagaaacaaaaaggtcaaaacccttcagctcatcacataataaaagcaaagtaatgaggattaaaatctgttccaatcaaccctgcagaagaaagaggatgatatgtttagaatctaaagaatatgatttgtacacacaagctcaacagagagagagaaatgattcctggagaaatggcatgtggtggacctatccaccacttgaaaaggggatgagagaatgcataaaacatcatttagggggaaattttttaaatgtattttattatcaaactaatgaaccaagtgaaaaaatgcaaaggtataatgatttgcaggaacatcaagctcctactcagaatatggagtagctgggagaaggagggtggcaaagcaatgtctggcagcatccgattcaccaatgggctgagatgctcttactgttacaccatgcagcaaacccagacatgacagttacaggacagcaaactcctagagaactgttcaaattgttgtgtgtaaaaaatgttaatgtgctggagacaacagtgacaatcaatttcataagaccaactcgttcctgctctcgctaaatgaaaagaaggaaagctaaagtatgtttgggttttcttttcatttgttctcaagttcaggaagcacagaacagattttcgtagaatcttggctaattggacttacaatcctgatgtaactgtatcccatatagtcatgccaattaaaaacttcccagtcgagaaggactcttttccccaggatcttcattatatacttccaaaactacatgtaatgttaactgttcttagcttccctttgtgtctagggcacatttacggattggttcccacaggattcatcctgccaggtattctgtgcatttttaattatttgtttcttatggtcttcacagctgacaaagaggaccattcattaaaagtataatttggaatggtcactgagtctgatactcttctgcatagactgcaaattaattcaaacctttagccaaagtgggttaggataagctgtccttcatcattttctcctgttattttacactgagcagctcatgttagggtgtgaaatttaggtgtgttcccttttctaatagagataacacacactatcaaattggcaaagataacaacaacaacaaaaacaaaaagtgaaaaatcccaggtcagagggaaaatgacaaactaggcatacacatctggtaagagcaaattggttatacccagagtgcagtttggcaatctgcagcaaaagctaagtcatttctcctaagaaaattattaagaatgtatacaaacactctgtggcaaagattacatagaaaagttaacaatctaaatactaagtgaactgcagaatagccacagagtggaaaaagcatgtcatcagtgatactgtatggccttgttttttagcggggagacaacccatgcctctaagaaagagggaacaggatattgtatcctgggagacacagaccatgaagaaaccaaatacacattccccaccttcttttctcttgaaatacctagatcagtgctgtccaatagaaacagaatgcaaatcacaaatgcagctgacatttgtaatttaaaattttctagcaaccacattaaaaaaacagatgaaattattttcaataatattttcaatacagtatctccaaaatattatcatttcaacatgtaatgaatataaaaatattgagatgtttgacttttttttcctaagtatttgaaatccagtgtgtattttatactgccagcgtatctctatttggactcgccacatttcaagcactcaatagccacatgcggctggtggccactgtgctgtgtacgcagatatagatgtttatgggctgttgcctctttcacagtttaacatttcccttgccatgggaaatagtagcttggcaccatttaaaccatggctaacacagttgcagactctgctttagattgtttatggtagttgctttaaagtgggctcacattagggcaataatccaacttttgtacttctgaagttatttttctaaccctgggtctcagggagataatcactcacttttggggttaatctctgagaatgtctgaatagcaaggcatacttgaaaagtcccagaagcattttcttttcgtttttctttttcttttcttttttttttttttttgagccagagtctcgctctatcgcccaggctggagtgcaatggcatgatctcagctcaatgcaacctccacctcctgggttcaagcgatcctcctgcctcagcctcctgaatagctgggattataggttcatgtcactgcagctggctaattttttgtatttttaataaggcggggtttcaccatgttggccaggctggtctcgaattcctgacctcaagtgatccgccccactcagcctcccaaagtgctgggattacagatgtaagccatcgtgcctggcccccaacaactttttcctttcaatgtacttggtaagactaataaatggtataaattaagtcttgtggcacagcagaacatcctacaattcttccttcattcccaactcttagggctttgaatgagctttaatcatatactttgagtgaaatgaattataatatatgacttgagaacacacctcagaatggtacatttgtttgatgagcttcattttaagaaaaaaactgggggggaggggaaccacatatttattcactgcctaaaaaacaagaaattgactaaatctgaagccaattgaccctgcagatccgcagcctctacttgtctgagataccaaaatttaaccacatgatgttaggggagcaatcagggaagccactagctcttagggcacctttcttgcaaattagaaaaatgtaccctgtatgggaagggtcaatctctgaagtacaggacttggtgactcagtgtgagatggatatcagctccattcacccccgaccaggcattcttgtgcttgtgcaggtgacaatgcccacaatcgtacatggaatcctgggaacaatgtcccagttagcatacaacagcagacacaggtagaaagctttggtgacagcagtgagctcagtatgtaggttacagatttcctctggacatcccagtaccaaaaataccatccttattaaatactgcaaaattggtaactgtcctccttatggaaaggtgaggcagaaaataaagaataccagattttcaaaaagtaaaactactgttatgcatccaaattggaaattaaaaatttaaagcctagggcagttcttaatatgaataaatatgtgatgaacttaatgaaaatattttccacaaatctttataaaatatgtaatacatgattctgggagtgtccaccacccaatgatataactgagaaagttggagtttgttgattgcacactttttcactcctcctttactgtagtgacgagagactatagagtactcaattttatgtatactagaaaaaagttacagtacattctattgtctatctaaataaggtctagatgaaagtgcacaataatggcatgtcaagctcatctccccaaccaaatctggtattccttatacattgggaaagcagtcatcatatcctgcttgctatctatatatctttttctcacatatattttaatcttgttaaggatagaaactgttttattcatttttatgtgctatgctatctaccacaacacctttgacataattggtgctaaataaatggtggttgaattgattttttaatttaaaagacttaaaagttcaaaaaagaaaaggtagtggccataagacagagaagacagggtgtgcacagaggagcctctgataatcacccactcaataggcagaagaggagagttgaggaaagagaatgaagcaaacactattggttccaggccctatttgtgccaggcactggccaaggagctttacatatgttaccttacttaatcctcatcacaggcattataatccctactttatgaacagagaacactgaggccaggaagcaaaagcaagttgtccaggatcatccacctattacacaggcaagcagggtttcattaggcctgcctgagccaaatcacatctctctccccagcgccctcagcactggaggccaggcatggtgggaggagctgctgaagaaaaagccaagaagccagctgcacagactctgaagaaaaattctattgcatgtcatctaacgagagagttacattttccctttttcctttacctgtaacacaactccttccagtccactgaaacaaatgttttcattttgaataacatgaccatctcagcacaaattctaaattgatgaacaagttattttaataacattcaagataaaattccaggaaaaaaatattttgagctcttattcctttgaagtttatggtaacaatgacttgttactcgtttttcctgtgttttggatgtagttggaaacaaacagatgtcaaagccatggtgatgctctaaatcatttgtggtgatctaaaagttctgggaaaagcatctgtaaattaatttttgccacggtgccaggaagtaaaacacaagagtgtatttattacacaccatgatgtgtcttttaaaaaggttcttattgaaaggtccaaaacagcaaaatgaatatagtctatatcttccccatactgacatacatctttacatacgtgtgtgtgagagatgcaattaaaatatatatatatatacacacacatacacatacatacacgtatatataaaaaacagcctttgcaaccaaagtaaaccgttataagctactgtgagtaaacacacagcaacatgttttaaaggtatttatctttgcattgatgtttagatcattactgctcatcaaatgttcacaatactcagagtgctatgtaactctatgtcctcatcctttagaagcctgtactgttcaggttctgatgtctcagtcattctcactcttagacacacacataacatgtacaaatctgttgctctgttgtgtagaccttaaaggatcagtttagattaatttcagtattagccaatcaactgttgagagggcttcttcaccaatggtattactttttgattcttactttcttctatatactttttaatgttatttttttctaatttttcatgacctatgttacttttgacagaaaatattaaaacatactatttctttgctgtcatttattaatggatcaaccttatttaaggactataggttaaaatacctaaagtagccagatgagacaattatttgaaaacatctctaattctgctcaattccagtgacagctttaaaaagagacatctttgagtttatcttcttatggcagatatgagactctggaagactttagaaggaagaatttctcaaaacattttcccaggaggtagaggcccaacactagctttcggttctccaaggtgtaatctagtaacagcagaaacacgctagcatacctcagggtacatgggggaaagggtggaacagagaccctaaggaaacaacaatagaaattatagggggcttggagtgtgaggaaccaacaacacttgaaaaagatctgaggcaggtgcaaattcaagtaggaagaaatgtaggtaagaattttctgatatacaacttataaaagatgggcaaactgttaccaccatccagaaaaaaaaacctagcaaaacaaagaaaacttcctgagtctaaagctaaataaattagcagtatttgtccatccattaatgtttgtaaaacttccaatttacttttttagaaaactgggatacccataggcatgttagtaaacatacagattttttaacacttgctattgtaaaactcatgtaagtcttagaggcatgatcaatacctttaagccaacttaaatacccaacttttatagacagtgtcatacaccaaatgatggttctgaatctggtgactaagtacattttcacagtttactctcattttccccatttctccccttttataaaatgttcttttaaaaatattataaaattggtcttgaagaatcagaaaaattattagttattttagagcttaaaaaaatatatgtttgagtgggtggagggataacgaaaattttttaacagaactgggatgttggctctgtaagtattaaatcctttttacttaatcatataatgaaaattttttcatgtcattaaatattcctccaaagcaagatctgcaataaatgttttaatgaacacactataaactcattatttctgagtatttatattgtttccaatgttttggtattacaaatgacattgtgataaacacccttttactaccatcttcagtcccataatgaccttccctctaccagcacccatctcactgttcctgcagggtgagtgactgtggcagaggagagccctgagtcccggcactttcatcctgacactgaagctgattacttggtaccactgtcaatgacagaaagtctccctcttggtagcccaaaaggggaaggggaatctcatcttcactgtgaggaggggagaattcagaattcagggcccagaaaggaatcagaactgaaaaaacaaaccataaaccacaagaaaataaatcttaattagacagtatctcaaggacattgtccctgtttttagggactcctagaaatgggtgttcataaatagggaggcaatagggcagttgtgctgtgctaccatctgttttatgttttaaactgaactagcaaggtacattaaaatgttcaaataattttatctcacatctcaatttcccttccattttgaatctcacaataaatatttgtgttgataaatgaacctgggcaagacctaaggttgacctttcacctccaatctagttatatgttttaaaacatttatgactaaaatttcgttttgcagtcttaaaatgtgatcctaaaacctagatgaacttgcctgtgaaatcaaatgacagtaacttgtttttcaaagggctaattgagatgtcctgaattctgagcagctgctttattactgtcatttacagaaatttaccttaaatatctgacccttctcctcatagaaaatggcttctattaatacttggcataatatcattaaactgggagacaaaaatcatcttctgagaagcatgtgttttgagtatccaataatctaaatctatgttcccataaaattttaaacataaataatctaagcagctattcacttgtgttccttacagtaactgaaagatgtaacacatgtaatgcaaaataagaaaagcttatttttaaaagccattatatttatttgttaatagtgccagtggactatttagagtatttaaatgttcaaacagtcaagtctcctcttaagactaagttagagtcacagcagaaatagagcatattctagaggtcagacagacactcactccacccggaagcaagcatccatatcatctgctcatgtcaaagtccttaagaggcacatatcaagttagcatttcagaaaggaaaatcaacagactttatatatatatatatgtgtgaaaaatgttagattgccattaccccattaccagtgaaacttagggatgtccaaatgatatgtgaaaaaataattattggctgggtgaggtggctcacgcctgtaatcccagcacttagggaggccgaggtgggcggatcacgtgaggtcaggagttttgagaccagactggctaacatggtgaaatcccatctctactaaaaatacaaaatacaaaaaaaaaaaaaaaaaaaatagccgggtacggtggcaggcgcttgtaatcctagttacttgggaggctgaggcagaagaatcatttgaacccggaaagcggaggttgcagtgagctgagatcatgccatcgcattccagcctgggcaacaagagtgagactgcctcaaaaacaaacaaaaacaaaaagaaagaaaagaaaaaacaattatctcccatgaactggaataagggacctatgaagccaccatggcatggagctcatggaaacttactgataagacaaactgagatcccaggcaacacttccattacagaccacatccagaagaagaccactgccagctgggcaaaaaggctcacttcagtgaaatgctacacccaaggaggggcaactgcagagttctcaaagattcctcttttcactgaatctcaggcaaacagaatcagacttctagtgaatatttctaaaaataaaggcagagtgtgcattacttgtatgttcaaagatggctgatttgcatttcagaaattctcttggaatgtcataaatttttaaaaaattaaaaacaagaagtctacattaaaatgacagactgattttagttagcaatacagcagcactgagccacattttgctgtcttattgtagccaaattacagccatggctttgtcctgggtctgcatatgaaaatggaacaagttcagtggggcctcctgtttcattattaagcctatcggattactggttctaattaaggatcatgttactggctaccacacagttattaatgtgcattattgccattataggaagttctgacctctgctgtgagtcacctggagtaaaatttaattatcaaccagagaaaatgggagtaaagacgatataaaatggcttcttatgaggcatctgtgattgtaaaatactattttatagcacttgttctgccattaggagaataattagagtggagcccctttttaaaacctaaaaataaactatccagaaggcaagaccacaatatattctattctacttttgatgcgttattaatttagcaaattgcataatatatttttcaaagttcaagaacatgagctacaagaaactgaatttactgaatgaaattaggctaacatttaaaacaatatcataggaatcgcaaatatgttttaaataaacatattttcctatcctactctttgttggccaaatataacatcttcaaaagatatgaataagttatttttcactggtgtgcaagattaaagatatgaaaagtaattaggaatctgaacaacttgtcattaggaaagcagctgctaccttttaaatggacattttctttcttttaacctgaaagttatattttttaaaagtcaagatgaaatcggtaaaacaacccacttctgatattttaattgtaaaactaacgatgccacatagtcctcgcaatagccagtaaagaaggcaaaagaggtaacttgtaagcagcaactggggggaacagcaggtattactaagaaagacagtggtttattcctctagaagttttaaccaagattaagcacttaactttctgagataccttccgtggagccacacccaaaggcagaagatgggcaaatatatttttgcatcccattccctatctatgatgttttgcctgccttgatgaacacttcatttttcttttgttttttgttgttgttatttctagaagttgtttcattcttaatgaacactttagtctacgactccaacagtatatggaaacaccaatggtttctataaaggtgtaaattattcaaaaggaggtcaaattttaattttcaagagccaagtgcatggaaatggcaaaacatttacaactgtgttcattttgcaactatttactgagtgcctactaagtgttagcattcagttcagacactagagagaacagagaagaaaacccattattacagtacagatgggtgttaggtaccatgagctatggggggctctgctggttgggcttcatatcatcccaccatttagcacagtgctggacacatagtagatgcccaataaaagcttattaaactggacctagtatacaataactccccagactaaaaaagtgacgtatcatctttaacttaaaatataatgataaagatatattaatagacatttctagctatgagtctcttaggtttggtggtctacatgataggatacatacctctatgtatctcctacaaataagcttagaatgttactattttacgcctgttttacaagaaaggacaccaagtctcaggcaaatttgcccaagattacatggtaatttcagaagaaatgaaactggaaactctttttcttcctattgtgaaacccacaatgctaagtagagtaactcagagggcactcgagtcctagagactagtagacagaaaaacaagacaacagcccagaaaagagggctataccagacattttcataccagaaatgatcagtttatagagagcagctgaaaataaaggtgagggaggaaagggtgagttactaacatttaaaggcaggaagttaagcctatacggggaggctagtagtgtttcagggaccactgtggagttcaagtggcacctgaaaccgcccacacctgatgaaagtgaggagacctgaagtagagattagaaattcatattccatgtaacagcatttctattttaaagataaagaaacagaaacgcaaatattcagtgcattcttaaagactggcttgtaagcaacccttgctggtaactggtaggtccaaggtccgaagtcaggtcatctgtttctaaactgactccaagtcatatgctttgtcttttacttattctttgagaagacagctcacataaatcatatcccttaaaatcccattgaaaaatgtcagagaagttccccatgggagggcagaatggggataatattcagttttccagtgcttgttctgattggctagagtctgttttctaactgttaaatattttgatgatcacttcagaagtgggtggtgagtagtgggaacaatctttccttataacgctagatttaaaacttaaagaaggttggataccactgtaacagtccaggctatacaaagtatggtgtcaaaattggtattgcaagcagacaatggctgttcagagtgaaggagcgttagtaacttcacttttcacttcccagaacccggcatagtaggcactctcaataatatttgttgaattacttgataaacaaattttccccaaatcttggaagccttctccggtctttagggttttctcaaccactgaatttctcccaggtatgccccttcttaaaaaaacttttagctagagctttggctcttgacctcttttgttctgggtctttacagttatcagagatgggctgcgatattaccgaccgtaggaatgtactctttaacatgaatatgccagtccagaagtgatgctaaaagtatttaactccttgtatgacacaaacactaagcaaagtgggcagcagttcatggggtctcctggtgctgcatggggccctggggcagcctgggcattctttcagaagagtggcctgctttcctgtctttctaaggagggattttgtttatcaaaatggtataaaatgagaattagaacatatccttaaaatagagacaaatcacagaaaatatccaaatctcctttaaatccatttaaaaagtgaacctaaattgatctgagttctcatgttgtaaaactggaaaagcttccatcatccgtccactcctcctgaagatacattaaccaatgcaggaatggggttaggatgaagacagccagcaagcaataggtgctacatattaattctctcaatgattaatcctaagactgaatctttcaattgttttaagccttcctaaaacttaagactctgaaggcaatgcaatggaatggaaaaactgaagaacagaaattagcagtcttagacaataacaaaatcctctaaacactatagagttatgaacaaaatttcttaaagctaccttccaaaatacaccaaagaaaaccttatttttcatttggattccctgataaattgaaactaaatataatattacaaggaagttctgctcaaaaagcaaactttgaaaagaatgattatgaaagaaacttcattgtttccttttctagcagtactaagaaaaaaagatattttcttatcaccagtgaaaaaaataggtataaaaccactgtcagagtctttcagctttaacttaaatcatgtaagaaatgaatatcagaaaaatgaatgactttgaactaaaggggaaaaaaatccactttgagtattaatgcagaggtgggaccatggcttttttcttttttttcactaagggccggcaattaattgcttagaatgctaaagctgtattctattgcctctgtagatgtacgaattcaaatggtttaaagtttcagtgaaaaattcaacataactgctcacaagacatttcaaacaactttaccaccaaagcaaatacaaccttgccaaaacacaagattctcaaacaaattttaaggtaatggttataacaccatactatgtttatttaaacaccatcttaaaccttacttttatcacctcttacagcatcagtgtgatatccagtgatgtaagagacagccacaataatgaattccagtgatgccaaagatcaagtaagactacagaactggaaaattattctaagcaaatggtggtgaacacaagacagtagtagaactaatcagttttctcatcgaaggtcaacaagtaccagtataaaccagccctgaatactatgggtgaaatcacctgaaggtctgtctaccaatttctatctgtggaagttgtcattttgagaattacatttttactgatctctaacaccatacaaaagtaccttcatatatattatgattcataacatttttagactaaggaattttgctgcacttcaagggcaatgtctcaaatctagcccaataacacaccagtagaagccctgatatccttaatcttctgtttgaatagagtgctttattacttagtgctttcatattcattatttcaatcttaattcagagtccatgattgagaaatgaggctaaaataaacagcaacaaattaagcaccgtctaatgcatggaaaataggcaggagtggtatttccgagctttgaccattctagaacagaacaatggcctgcacagtgattatctctaattttattaccggaaaaagttttcctaattgtgatccaattaaaggatgctatgtattgcacctaaaacatagtgagaaagtaaaccattatataaatccaccccaagccaatactggatttattttcccaaaagagtatatgcatttgatatcccaaatgctccccaacaaggtattttaaaggtgtctcattcaaaatatcctcttcaccagaggaatgaaaagtttctggttgatgtttttcatttacttacaagaataaaaatgacatttacccatctacacattcaaacataaatgcttatgtgcaggtatgtgtgtatgtgtatttatgtatgtagcatgtatacatattacagcctgtcttgttttagaaaggacttagggtagcttacaaagagacataccctagaaggcaaaggtaaaaaatcaacagcaaagaacacaggacaaaggcaaaaatgaggcaggaatgaaatggctttcacagaggctgactgtttcaagtgcttctcattgatggctgagcctgaagagcttgtctaatgactatcaacctgcactgatcaaatacagcatatgacctagagatgaagcacctgattgacaagaaatctatcataagcagctcttcagcacaagcataattcaatggtaattggtcctaatgatgagtctggaatgcaagtgataaatgtaatgtgaatgatgataagaaaatgtatctcaatgcatcctattgctttgaaaattgacgattcatataagacatataaggtaaaactctataatctgaaaacttgatgaattagtataacttatttcttgactatactggaagacagcccagttaatgattacttgagtttattaatgttttatagagggatatttaataccaaaaaatctgaaacaagcaaggttccaggaccttagaaagatgaagagaaatcctttatttctccttttttggatcacagagcagaaaggaatctgccaagagtttcaaatagctttcctcttgcatgcccactctgatgagttactagtggttgtattgtatagggaaagattccgaggctcagccaggcacagtaggaaagagtattctcatctatttattagcaattctgccaggagagaggaaatgaggtggtacatggccacttgcttgtttatttctgatctctggtttaatttgctgatgtcaccaatgaagagccagaggctaaaagtatctgattatttaccactgcttaatagatgtatttattcgtagcctgcttcattacaaaaatgacttgatgtgttacagaaatacacataacaataaatagatgaaaaaaatccaggatgatagagaagaatatgtatcatgtgggaggataaagtttgttcttgtggcaaatcctagagccttcattttcaacacagcctttcccagcactgagtaatccacattcactacattttagttgctcatctcagagacagaaagagagagagagagagagagagagagagaaaggaagggagggagggagagaaatatgtaccccaggaataggtcatgagtttggctatcaagataaaaatgcctccgcaattagggatttgggctcatacccagccttcctttgtgccatataaagcagcattttattctttcattcaaaaatatttactgattttgcttataataagcaaaaataagcaaattatacaatatgttaggggatggtattatgacaatagcacaagcaaagcggggtgggggggtggaggggggttgagattgagaatgcccaggtgaagtggaggcagattacaattttttaaagggtggctgaagtaagctgatggagaaggtgacatgagcaaggtcctgaaggatatgaaggaacaagtcagaaggatccaggggaggagcagtgcaggcagaggaggaaaacctggtgtaaggcacgtggaaggcctggtgcacttaagaaacaccaaggagtccactatggctgaagtgaagtgatggaggacagtaaggggagataaagtcagagaagttatggggagaggaggcagaaaatataaggtcttgtagccatcgtaagacagcctggcaaccgtgtcagtgtggcagcagcactccgaggaccctgctgatggaagttttaaacactaacagcattacaagtggagaatggaagactgcctaatctgctcccatccaagatcatttaggaagcatctcctcatttctcctcaatgtggtattaaaattcttctgccctggacatttgtcagtggtgggacccatggagtacatcttggtctagcagtatcagaggtcagaaaaaccattacatctgtgtaataacaatgaggtacaaatgaacagccctgtaaagaaataaaagcaatccagaaagactcacaacagatatatcattactgtctacacaagccaaggaaacgctggtactgttaggcagacattgaaaggaaagcaggggagaggaggaaaagaaaggaatgaacaacaatggcatgatgaactgcttccagaagaatgttccttcatgctcaaggctgggaatttatcaagaggtttatcaggaactcaggtagagaatgaagcagacggctgcatagtattccatggtgtatatgtgccacattttcttaatccagtctatcattgttggacatttgggttggttccaagtctttgctattgtgaatagtgctgcaataaacaaacgtgtgcatgtgtctttatagcagcatgatttagaatcctttgggtatatacccagtaatgggatggctgggtcaaatggtatttctatttctagatccttgaggaatcgccacactgtcttccacaatggttgaactagtttacagtcccaccaacagtgtaaaagtgttcctattcgccataaaaaaggataagttcatgtcctttgtagggacatggatgaagctggaaaccatcatgctcagcaaactatctcaaggacaaaaaaccaaacaccgcatgttctcactcataggtgggaactgaacaatgagaacacttggacacaggaaggggaacaccacacaccggggcctgtcgtggggtagggggaggggggagggaatagcattaggagatatacctaatgtaaatgacaagttaatgggtgcagcacacaaacatggcacatatatacatatgtaacaaacctgcacattgtgtacatgtaccctagaacttaaagtataataaataataaaaaaaaaagagagaatgaagcagatgcatacctcacaggaggtttaaaagtcagaaccaatacttttaaattgtgatttattaagcaggcaaaatacaggtaatacaaacctctgcatatgaaacacatatccaggcaagttgctgaatgtttcctgtcttcaaataattaaaggcggggcaattaattcaatgccaaagtaaattcctaccaagaatgggtataagaaaaatcacattttaaaaaactttcaacaaagatgtcaatcaagctaaaagttgctagaaatcatgattttgagtatttgctgactttaatgtttactgacagtccaggaaactgttgtgcatccactaatttctttgcagggccattaagagaagggaccagattctcctttccaatggaaatgcattagatatccaaaatatcagcattcccaagtgagccactttgataataaaaataacgattgctatacaaactgaaaaaagaaggtgactaagcaatgttccttctgtgattttaagggtagtcaaacagagagcatgagaaacatttgcttctacctctttccccaaaaagtttgaggctgctggcaaaaatatatgcaacaccacaagacaaaaatagatataaagttcaaggtaagtgaagaaaaaatcaacccaggagtagtttttccacagacacatgaacctgaaagtgagatcctgcagagctgctaatgttggatgcaaagctgactcataacttcttagtagtgaacatagggaaatacaacattacgaaattgagtattcattagagtaaaaccaggtcctgggcttaagagaagttctgtttttcccagctctaatgccggaaggagcgtcttcctgtggttcctcctaaaagccatactctatgtgcaatgcacggtcaagggatcacctggggcccaagtactggaattctacaagggcaaatagctatgtggttaatgcacaaggctttctgataatattgctgcatccagggataaatggcacattccttggaacagtggctaccaaattaggctctgaagaagtactttaggggttccatcaattttccatatgaatattttgtatttaaagacttcttagcctttaagtacaaaaacaaataataggaaatgcaggcaaatatatagcacaacaaatgttaacttactgatgaccacatctacattaagttgcttcaagtgctgacactagacaaatgtatctcctgctatctctttgtataagtgagtcaccgattaggaaagttgtaactctgcgttggtattcttttggaaattcaagtctgcacatgtccgttcatataaaactgtacaaatgacctacacatccatcatgctcaaacaaatgccaggccaagagcaggtacaactagttggcacacaccctcaccatgatctaatagacagctgtataatactaaagtgcctaccgcgttgcatcatgataaagtgacatcattgactggtactgatgctaagttttgggtgcttctggtctgacttttatatctattatgaggcacgtgaatagctgtattattatgaattcaatgttgaggcaaaaaaattatttccagtttctattaagattaattcaaggggatatcaagacaaaatgagcttgttaaaaattaaaaccttttgcagctgcataaggattttccaaatgtcatacaaccaaaacaaaatacagaaataaattaggtatgttactgatactgttctgcaactgttatccacatttttgagtttatcaaaactgtctcactgttctccctgataagtttataaatgtaaatttgtacttataaagcatataattaaaaataccacttataaatatttttgtatatagttttgttgaacatttttttaaaactacacttgctggactagttctcttaaacatgtcaggagatgctgattctgtcaacccttggagactgggtggggcctgtcacctccagcaatgaccagcctcatccataggtggcaatccaacataatctaattcaatgccaatataacataatacaaatattatcctttcctctgtctgccaagttgggaagctctgtgatgaacaaagaaactccaaatccttcatacaattcttcataaatcttatttcttcgaagagcttgtgtcaagacctgcccagtggagaggacaaagttaagttctttggcaagaaactgaagtacagatatttcatcctcatgataaagagcagagttaagtgtaacattcacttgtgaaaagtaaagtggcaaatcaagaagagtggatatttcaggagatatggactcttttcccaagcctgccccttcctagttttgtgactccaaaaaggtcatttaaccttccctgagcctcagctttttcagttataacataaaaagacgaaatcaagctctcaactgggattgaccattagaagctttaaaaaagcttcccagtagcagtaacattaatacatgccaaaagtgttcagagcacttgacattaacccacttagtccctacaagaaccctacgttgcagatattatgattatcccgactttataggtaaggaaactggggcacagagaggttgagaaatttgctcaaacaagaggcggggccaggtggaaagctctgagcctgtgctctttagtataagtgcctgttatgctgtttctccattaagtatctctctgtcttctgactcctgaatctatagaaggacctgacatgtaaattttgattctggtgcgtgttcctcgttaacagccacttgactagaagagatgtaaagttctgtaattcagactagagatgaaaaaagttcaataaactttttaattaaataaatgctcaaattcttgtgcctcaaaaatcagagccaaaattaaataagtatggcttttaaaaggtaattgcatgctgtcaaacttaaactaagggtaatgaataggggtggtggaggaaaatctaagaaacaaaatattatctagccagctacacaggggcattgaaataggttaagcattggagcaaaagctatgcctcatattaagggacagtgaaaacaattccacaatttatggcctggctttgaaggtgaagatgaaacactttggaagcccacttggaaagcatcagtgctcctgtccaaatgggctagcaggcccaatttgtttcgaggaccacaaatgaatgtctctttgtttcatctttaaagaactagtccttatgctgcaggaaagtgtcctttgtaaatctggaaatctaaagctgtacatgcaaatgctgatactcaaacacatgctgatctcccatgcagattcctttattaacatgtgacacttaacagaggcaagaagatgctatggcacaaagaaaaaatgagggagacaagtggtcctggccccttaagcaatttagacaagcgttaagtctggcatggccaagttagtaagcgcatagacaggcaagaggagagaaagtccatgtgccctggcagcaccataaacttggtcaggattgtttgtgctgtgagtctactttctcgctaattctagatacaccatttatggaaactcatcttcctttcctcccactcagttccacggctctctcacgaaatttcgtctcaaaagtctccagtttgaagtcaaacaattctaatcaagggagttgcaaacactttattaaataaaaaacaacttttcaaataatttatacacctaaaacaaagtataaacatctaagaaaataattaagtattggagatcactgctgaccatacaggctatctcgactgagagtttcgaatccactataaataatcagtgagtaataaacaaacagaacacctgtttcagctgacagaatgtttaattactagtctctcttctgcactgaagattcaacagcctggaattcatgcattacttctttctgtttaatagccacaccaaaagtacactaactcataaagcaaacaggcactcaatttgcagtttcccctgagagtagatgagaatttccaggtaagaataaaaacaaactctttctcctgatccctatatttgttaatgatatcaaattcccagtttcttaagactccaaatcttatactcatctttgaaccacattcttcctctaccctccctctggcccacattctatcaaggacaaaccttggggcagcatgtatcacccaccttctcagtgaagtacaagtcctcttctggtgttaaagattccccccatcatggcatcagtgaataccagacagggcaggtaggcaagctagtcctgtcttcagtgctggggtggggctgcctagctcatcctgaagattcattcaaatgccaaactttgcctgatgccccccatcacatgcaatcactccctactttgtaatctcagtagtaactttctatctctcacattctgatctacattatgtgtgaagttcattttctacacctccttaaaggtggaaaatgtctcagtgcagtatctagaaaaatcactggcataatgtctaataaatatttgttaaattacaaaaaaaatgggattcaccattcacttctccccgaagtgtcttgatcttatgttttaatcagatttatacttacagcaaaactataatgttcttatatgcccattattttctaaagcagtattaggacttgtaagacagtgacccctaaaaaattgtttcttttcatatatgcacaaaccctctcaggcgcctagcaaatgacaagttggataccttctctatgctgtgtaatcttggggagctgcacattagacagctaaccaggagctgagtttcatatgaccagctatgctaaaagggattattttgctagatgtcaggaaagacaggttcctcctctatcctcctgcctttattttgagttttttattttattggctattcaagtggacataagaaaaggtgctttttctaataaaatcttgttaaatctatcatggcccaatatctcttagggtcctggagaaattagtctattgtagtttgtggtgctgatgaggaagcaagggtgctgatgaggtaaagaggaagttaataaagtagcattcagggtacacttggagaggcagaaagcacagtggttcagaggatgagctctggagtcagactgtccattcttaagttctggctccaccattatcagctgtattatcctaagcaataagaaaaagaaatatctttcaacttcattttgttcttcctccatgttatgaagcagcaagaaggccctcacctgatgccaacatcatgctcttggactttccagcctccagaaccatagccaaattaacttctttcctttataaattacctaatttgtggtattctattatagcagcagataacagactaagacagaaaattagagatgataattttgctcataaaactcttctaagggttaaataataaaatacttggcatagttatcgggagacaacaagcattagacaatttttggctgctagcattatttagatgtttacacattacacagaattttttttcacatgcatttattatgaactaaagatgaagggaaaagttatacatttctgagattcaacagtaactcaataaggaaattctacataaaaccaagcacaactgccaaataaagattttagaggcttttattcctgatgacagtactttcaccttcgtataatggttaaatatccccaagctgctgctacagaaatccaaggctcatataaaggaacaaggaaaggatgtaaatactatcttcaatcacagagaaggaaagggtgatttttaaaaaaattcttatggttatgataattatttccagtgccggctccccaattaacttctgctaaggctgatattaaaacgggtttgccaacagcttgtgtgcagtatttgggcattagaagacagaatggctctttatcatgcctaggagtaacaaaaagataccctaaagaaaaaggtcaactgacaataacgaagattggctaaatttctaaatatccatgcttaccagcagattttatactaaggatacattagaaaatagacataactgagattttctgtcaaaatatcaaatgcatgtatgaagtaggtacttggtaataattaatatttgaggtttcaacaactcaggatgacattaaaattccctgacgtgcagttatgcttaatactgcaacagcacacatttgaattgtggatactctcacagaggagagcacgttatgaagccagtgaagaagcatagcccattacctaaggtccatatttcaataaggttttgttctaattgtgtacacagcaattttcaagaggggattaaacactgtgttaatttttgaaaactgccaccccctaagaagacaaaccgactgacagttctaatgataaaatcgaagaaagtatacacagaggtatgagatggttctctattgggaagcaggtatttatttcatgggattttctttttctgtgatgctaaaattatttctgtgaaatctggggatttccaaaagtcttcagactacataccttggtatgtcaaagaagtactgtacataaagtattacttaaagtgccaacaatcttctaaaccaagagaagtaatgatgcaactaacatgaaaaagaaaaggattctatatttcgcttacccaagagatgaatgggaagaagattcagttaattacacaattgctcttaagctctcaactctgctttggtgtccatttattgggcaggggacgggggatgattgcgaaggttctgtgttttgctcagtctcaaatgcatcatgtgttaaactcttcaacatggaaccttactggaatactgtccatgatgagagaattgagttacaatcagtgactcaacattttgacttagcagattggcattcctttttacgatgggacaaattctgtaaactgcacatcgtatagatcacacttttcagcaaaatgctcaagttccttggtctaagccctcattgtgtcatttattatgtgtcatcctattatgctagcaataacagaagcaagccaagttccagaaaatactgttattaatattttatgtatggagaatcttctagatcaatgaataaagaacttgagaagataaaaatgagttgttttctggaacaaaaacatttggaaatcaaaagaaatcctatgatttataaaacaaaatttgtaaatgggtgcaagaagctatataatagtaatagacacaaaaatggaatgcattttctataagtaactgcagaaaactcatcactttaacccaattttcactttttgggaagactaaaacattttttaccagtcaataaagattagtttttatttttttaatttttaaaggacacacttaatgagagaagaactatttgcccacaaccctatgtttttgtttacttttatttttctttcctcgaccctcaaagaaatataagaaataaaaattcactagatacagatttcagtagctttgtaaaataccattttaaaaaaaacagaaaattcaaacaactacaatacaatataatatagctcaatatgtcctaatctcaattatctgagatgtagtagctaccaaagaaaaaatcatctgtggatattttattgtaatgcctgtgagttaaatacaccataaccactatcaccatcaccagcagtaagacagttcttcaatttgcttggaagataacacataaagggtaaattatatcttaaagagaagctatttccttatattagcctctaatttaaccctacacgaagagcttcgggtttctaagactcagaggcgttgctttagaatgatgccgaatgcaggcaatgaaacctttggtctatgtctgtcacatctgcatagcaatctgaatactcctgtgtagaatacatgtgaagcatgtgtgtctctttctttctaaaataaatgtaataactaagggtatgttcaggctttttggactgagtcaagtcatttgaccttgggtcccctaactcaaaattctctcttcaatttaaaagtgagaactgagtccctcctgggtggaatgattttcctacctcatcataggatcattcttttgtattgaaaataagggctctcctatttcaggtaatttctatacattccaaaggatttcctatttacatagagatttcaaaacactgggtctgttgggcccattgctcctttcagagtaaatgttgaaggtaacttcataatagggtaaaagctgattaagcatcaaaaaactatttaatttattagaatgccttcactttcaaattttaccctaaaggtagcctaatcattttgtaataaaagcgatgattatttaatttcagggtggagagaaaacatcttttagcagatggattgcttaagaaatcttagtattacagagatcaatggagatgtacaaataatgaatataaccatttcaagttgtccttctcctgttagttgccctaatttcttatgacagtaagaataacttaaaatattcttttaaatcccagctacttgggaggctgaggcaggagaatcgcttgaacccgggagacagaggttgcagtgagctgatcacaccactgcactccagcctaggcaacagagtgagactctgtctcaaaaaataatttaaatcagcattcaacaaactagctagtggtttcagaaaagcaagtggttcattgggccctatttgtagataacaaaaataaaagcatggtcaaatctggggaacacagggagatgctggagttttgggactaagagagaaccactaaaagtcggtgcctttcatgtgtgctctctcccagttaatgcaactagaggcttccctctcacctatgagagtccttgccttctccaatccactcttcctacttttgtcaaaattagcatctgagagagacagaaagaaaggagagaaattcattatgctactcttctactccaacagctaactttttctctgtaactaaagaataaactccaaactaaaatgttagcgttaactgtcttagtcaagatgctaacaatatgcccccaacctacacctccagcctcatattcctttacacccactgacaccccgtcatgggaaccccgggtaactaacaactgccgagtgccagctctgcaccaagaagccctttctgtgcctttttaaacatccaagggttctcacacctcttgggcacttcttgatgcctggaggatactattgctttcacccttcatgaaatttttgttgtcctttaagactgagatgtcatctccttcctgaaagctaccccaattccttcacatcaaggttagctttcttctggcttctcccagtacaccacattgatgataatactatcctgtctctctgctgacctgtcttgctttactgtttcaccttttaagatctgtgctgtgttcaaaagcacaaggaaaacttacagagaaaataaaacatagggacagaaaataaatatgtattgaatattataaatgaggaaacagattacatttcaaaaatatttcattttaaatagtaacaggctatcatatcataagctagatttaatttcacatttctattaaagtcatatgttttactgcacttggaaacaagttaaaaatttactgaatcaagaattggtttaggaatgaaggaagggctgtctgtaaaagacgcaaagagtagagatttttcttttaatatcaagtcactggtttttccattaaaataagttactgctacactgagttatctagaactctgcatatgatgtcaataccacagcaacctttaagatacccggccttggccaacagagactctcagacatttactccactacaaatcagggagagccattaccaaatcttgcacacctatgctatttgtaaatctttaaaaaaggctggacataatggaatatttcacatgccacagtaattattatgatgagcaataatcaggggtgggtagcatgtggctgcaacaattcttctgcaaacacaggcatatctcagagacattgcaggtttggttccagaccgctgccatacagcgagtattgcaataaaacaagtcaaacgaatttttttgtttcccaagcatatgtaaaagttatgtttacactatattgtagcttattatgtaataacattatgtctaaaaaagcccggtgtgcataccgtaatttaaaaatactttattagccaggcacagtggtgcacacctgtaactccagctactcagaaggctgaggcagaatcacttgagcccaggagttcaaggctgcagtgcactacaatcatgcttgagaatagccactgcacgccagcctgggcaacacagtgagaccccaatctcttaaaaaatattttattataaaaaagtgttaacaatcatctgagctttcagcctaagttgtaaccttttcattggttaaggattttgccttgctgctgatggctgctgactgatcagagtggtggcggctgaaggatgggatagctgtggcaatttcttaaaataagacaacaatgaagattgctgcatcaatggactcttcctttcatgaaagatttctctatagcatgcaatgctgtttcatagcattgaagagagaaggctcacttctctcagccttcacagagttaaagaattagggtcttgctctggattaggctttggcttaagggaatgttgtaggtggtttgatctcctattcagatcactcaaattttctccacatcagcaataaggacgttttgctttcttattcatttgttcactggagtggcactctgaatttccttcaacttttcctttgcgggctgtttggtgcaagagacctagctttcggcctgtctcggcatttggcatgcctttctcactaagcttaattttgattttaaaaggttttaatttaaagtgatagatgggagattcttcctttcacttgaacacttggaggccactgcagggctattatttggcctaatttcaatattatatctcagagaaaaatggaggagaaggagacagaaggggaatgaccagccagtggagcagtcagaacacacataacatttattgattaagtcctatatgggaatggtttgtggtgccccaaaacaatgaacattaaagatcactaatcacagatcaccacaacagacataataatgatgaagaaatctgaaatatagtgaaaattaccaaaatgtgacgcagagacataaagtgagcatatgctattggaaaaatgccaatagacttgcccaatgcagggttgctacaaaccttcaatttgtatttttttttaaaagcagtatctgcaaagcacagtaaaacgaggtatgcctgtaccccttcctcccaaaaaaaaagcctcaaggaagaggaggttggaggttatgttagcattaagctacttccctggctttctcagctttcaaaatcaaaatctggtagagcttcttcctcctttgttttaaatgtacaattcaatataaattaagcttattctagcagaatttcaaggatggaagaaacaagagatactaatatttgttcagagacaattgtgttgtaggctctggaccagctcttttacttacattatttgatttaatgcttatcacaatttttgataatagcgttatttgacctattttacagtctgttgactgagaattcagaacttgcctagcacttttaggtaactctgggataccaaacccagcaatcctgactacaacgcttttgtagtctgggtgacaaatctgtttaagatgatacgctgttagcatcatgtactgtcacagacatgtggctaagtaatgtaacaggcacttggagaacagaactatatggaaataagatgctgattatgagctggcaatacataaaaatttagaaataaagaggagagttactggtgtggtccaagcacaaaggaggcaaacagcgtttggacctggccttgctgaatagagatggggaggggaggcaccggatgggaggtagtagaggagcaaatggttctcctgtcacactgtagggagggaggagtcagccggttcttctggtagggagaagaaggaagaagggctggagaagaaggaagaagggccaaagaagaatccacaaaacttagtgacaaagggacaaagagaaggagctgctgactcctaaagctttcctaaagcttcatgtttaagaaagtaaatttggaaaagagacagtgttgagagaaaggatattttgaatttgaggttgagtatgaggtaaaaataaaacaaataaaatattcaaatggaaaatgtgcaggaaagtagaaagagtggagaataaccctatcagaggatgggactatggaggaggcagccaagaaaacagaaaccagaagggcagagagttgagcaggagagggatgagagtgaaaaaaaaagctagggaaaataagagatatttaagatgctagtgcagtttcagttgaaagtctgaaggcaaaataaaaatggctaagatgtcaagaaaatggacacaacatgagccctcaattcatccatctaaacagtctgcctgagaagtctcaatgagagaaatattgcattggcaaatatttatatgacaaatagaccacacagataagcacggtcaagcagagtgtttgtttggcttgatttcagagaaggaagagaattaggccaagggatagtagatgaatccttttggctacctggattgttccatttcctgaacttgctggttaactgtactgatatcttctttgtgaatagataacctcttagaaatagggagcaaagttgcagcagcctacagcagtcaaggttccaagattcctcgtacgtgtttcacaatttagaagttaactagagctggttgacatctttcattaaatgtttctaggaaatttatctcttttcaatccagattacctgacagcactgtcaccaccctgtatcaggaacttaggctagttggcttccagtctgagctcctaccccacatgcctcctcctcttagccagggtgatctacactttccagggtcatgactccctctttcgagtctgggtggggctgcctttccctgtcatctcaatatcacaacatctgcttttccactgtaaccgcctctaacattacagcatctctatgttctacttcaaacacagtttttaaaaaatattttttgttttcctctctagtttttaaaatcttcatgtcatacttgcctttggacttcatgcactgtttgtatggaactgggccaccatgataaacattcctggcttgtccccatctttctgttaaataatcctctaaaatatccaagccccctgcagagccaaatcatttgtttccttcgttacccccctaattcagcctcaccaggtcaatttgtaattacagtgctaaatttttagttctaagtatttcttttcttttttagaggtatggatttatatctttttttctgagatgtttctgatacctacttttctaaaaatctctaattatgtccagtggttttttaagctctagcatgagtcccttcctcataaggttcttgtcacttctatgtcaccaactagctcttctttattggaaacaattaagttcagaacaggaatgctcttttgtgctttctctacattctaaggcacgaaactctcagcaagtcaaatttggtatttactagattctctgtgttaaatggaatgaagtttccagcaaattttgagatagactcttctgttattgttatgttttgcctctgcatggtacatatcaagaagactattatcagacttcagtataaaacctgggattgtacaagagccttcctttgcaagtgacgggagagagtgagggctgcaaagcgttattgctgctattgataatagcaaggagagtaatgtttacacacgttaagaaaatccatacatgtcaaagagaacaacaaaaaagaaatgaatattctaggaaaaatgataaaatgttcttctgccacatttgtaatatgattcagttcaataaaaaaattactgactcaatttttcaagtacatatttactgtatataaaacatggcattactccagtattttagggttaactgtctccttgacatcaaaactcaccctacataattcaacactagctgaagaacaatttgttttttgaattcctctcctcttctcttacacctcatgaatttgagagttacgtccattcttctgcttcttacagtcatatttttagttccttagactttatggtgctcttatctacctgtaattacgctgcaaaaacataagacaacgccactgaaaggccagcagcagaggagatagcaaaaggcttatttgtggtcttgaacagctgcaatagggcagggcgtgcctggcagggttccctctgcctccagccagcaatgacaaaccccaagagctgggcttgctttcacagcagtcgctagtgcaggacattatttcactgccccaaaagccaaggactggagtcaaagtccacaagggctgatcaaaaagggggacatgagaaaaacacagggagagtgctgggagggatggccttctagaaagttctccagatcctgaagagcaaccacctgctgtcccacccctcccctttcaaaacaaacacagcacaacaaccatcactccttcccccacccatggaaggccagatgttacttttagttccagtttggaaataactgaccaagttagttttgaatttttttttcttaaaaaaataagaagtaatgaatctggattttgaccaggaaaagagaaatgagatgttatcagtcagatgttttgaaattcaggtaataggaaacattctctagcaaaagtcttctattgcagttatgcaaaattctctctttaagggaccattattgtcttaggataaataaaaagtacgcttatatgtgtaggcttttctagctcgatgcaatttgatgctttcagtccttacacaatgatctttgcactatacagtgcttctggctccttgttttaaaattagtgctttcttacttagtgagttagtgtaattgcagcaaagaagcacatttatattctattcattgacaacattagcatataatgcaaatttactttggaactttatgcacatgcacacatcccttcagaacactctgaaagggcagaattgagttcttattcctaaagtgatgagggtgtacaatccagaccacaaaactatggatgctaatggggacagactaatatggtcccagctggaattaagagcttacagtcagtatgacgttagatggttaacaatctttctgacaaacaatgatagctaaagttcctctcataggatagaccggccctcagaggtgcatccacaaaaaatgagaactcctgaaaaatatctagccataagttttttttaaaaaaattcatattttacttctcatatgcccataaagtcaaattctattgagaaaatgctccaattcattttgatatgtagccagtctgatgatgttaatattgactcaaaaagtatttaagaagttaaaacttgaaacccattttattgttgtgacactgagagtccacagatacttcttataaacttctcttataatgcagtatatatcactctataatatgatcaagaaaatacttagcagctaaaataataggaacaactactacttacggttgacagagcttcaccaggtcctggtcggtggtgtggggaggcagtcctcggatatagaggttcgttttgctgagctgatcccatcctgagttgctactgctgctactgttgttattactgctggtggtgctgggactgggaggggccatggggtgggctgggaccagagactgctggaaaacaaagatcaggagccttagtatgctagcattaggaggctgacaccaaataaaatgaagttaccaagatttaaatatagattactttaagctactttgagttataaattttaatttacactttaaaaaaggtctgttcatgctactttaaaaaagccctctccttcaacataaaattgataatagggtttactaagtaaaagttctctatgtgcaccttaaatgtgactaaatttatgtaacattaatttattcacacatttttcaggaacacatctgagactcaaaacgtgcatgaagttagatgataccatcttaatacacagtaatttagaaatcactagacttttgaaaaggttttcaaattctgaagaacgtttgattgaaagttgcttaaaattttattaggatgactcttaaaaaaaattacttctcaagtacaagaaagttagagtttaatccagatactccaataaggacgatctcacctagttctaagacaggcacacgacttcattgagacatctgggtaagattcccaggcaggctgcctttcgctctggctaaccttgtgaaatttaacccctgtgagaatggtgtccaagctggaaaacttcccagcttgcagcacccaccacaactcaaagtaaagcctgcaaccaaaggactcagtgtggttttacagtcggcagccacctaggaagaatgtctgaaattgtactcataccagataattctctgtgcaccgactgaaagaaaccacagttctctgacccagtgccacacacatgactttgaggaagttaaatggctcagcttgagacaaaagggcacgtaaccccaagtgtcctcacagcaaacgcgcagcaatttcacaccaggacagggacgttttttcacctcacattttctaaatcataaatatactgtactaactcaaggacatcactcatgaacagtttgaacatccaaaattaaatagtcactagacagtcaaaaggttcaaatctcatggcttggtttttaccagcacaaacaagaaagtcaggcatgtctataggagacaaatcaaatcccacagtggaaagttggagaagcagaccccttacaataagcatatcctcatttaccttgtcaccaacctccgttgcccactatagattcctagttttgtacccagcttctgccatggtcatcctaattccataatatctcaacatatggggatctcattaatttatttttattttttattatttgagatggagtctcgctctgtcacccaggctggagtgcagtggtgcaatctcggctcaccggaaccctccacctcccggtttccagtgattctcttgcctcagcctcctgaggagctgggattacagacgcacaacaccatgcctggctaatttttgtatttttagtagagacagggtttcaccatgttgacctggctggtcttgaactccagacctcaggtgatccgctcaactcggtttcccaaagtgctgggattacaggcatgagccatcgtgcctggccccattaatttagatatgttaccattttttctggtcctatatccttcagattcttccttccactgcccaggttccttgctgagatatcatctgagtccaaacaccactttatttaaagagattctcttttagaaggagagcagcaaagggtcaataatagtcaatgcagaaatgctattcactgaaggctgaacttgaactgggaacatcggtattgcttaatcccaaaataaaagcagcctgagatcatatcctaccaaatctatttgattcatgcccttaatgagcagctgaactcatatcctttctccaaaccactagtttttctctaggggctaactacttactagatataaaactaagaccaaattctgacacttgctctgccacaggtggcacctcagagcactggccatgccccacaaagcctgtgctccttctctgaagccactgagttgctacctgccatccagccctactctatttttcacatcagtgagaacagaggtgctggaaagtagcccacacacctgcctcctgtcccaagcctttgattgacgcagagaacttgtagctattagaactagacaggactgaattttctcttaaacctcctttgattagtgtctcagaaaccatccctgacacaagccacactgttttcacagtaggacccagtatgtttagcgtagctgttgggcgatgaaatgtggtcatctgggatgagacttggagaagtcagtaagaagctgtggatcaggcccgcccctacctcttagtgggattacatcaacacgaagtaaatgaaccatcaggcattttaaagactgcattccaagactgcattcacttgaacctttgattttgccaggagtggaaagggagtggcgggcatgcacttgtataattaaagaaacatttggatgtatgacttagttggagattatttagacatgaaagtagtaggtttttttatttatgtattcatttctggccaaaatacagctatgatttacatatctgaatttacagagccagtttaatataaatttgatggccatccatatttactgcagtattttcccaatgtgggaagcaggtacagcctgtgcttccctgcttcccctgttaagtttcccctgtgagggaatgaaatctcccagcatctgatcccaggcagaagagggttcctaaatgtacccaatgaggactactagcctctggtgaatcctatacagaacaaagttcaaattcaaattttatttccaaatcaattctttcttggggctaactgaagacagagaaagaaaactgaaagagagaagcgttgaattattctaggttgtcaatttttaattttctggtgcagaaatttttaaacccaagattacgtttttagaagtcactgaaactgggccgggcgcagtggctcacgcctgtaatcccagcactttgggaggccgaggtgggtggatcacggagtcaggagttcgagaccagcctggccaccatggtgaaaccccgtctctactaaagatacagactctgctgagtactttacatacattaccatacttaattcaatcagacaggcaggtaggttattgttctcccattgtgcagattaggaaaccgagtctcaaaaaaggttaggccatgtgccagggccacacatttagaaggtggcagggctagaatttgaacgcaggtctgctagaaaacaaagccagagcagagccttcaaacagtactctacgtgggaccccaaaacactttctatgtcctgaatgctctatttgtattctttcattttctgtgcccatcatttttgctgactaattaccaaattccagcttctctgaaatttgatacttaataccattggcagatatgttttttaagaaagtaaaaggtgcctttaatgttttttaagaaagtaaaaggtgcctttaagttgacttaattaacacacagtctgttaagtattaaaaaaacaaagattagctcttaaaaaaatcagttttaaaaattctactttataaaaatcttttcattaaagaataaattctacaaacaacttctgaaagcttcagcatattactgctaaacattagagtcaacattttaggatgacgtgacttaaaacagtgaaaaattaaaccctcattcatagattaaaatgcaaatactgacaagcctttaattacagcttcagaactctgataaatttacagcaattacactttgcgttagattaggtgtcttggcagcacaaatgataaacaaatttttaaaaagcttacaaagggacaaaaagggacaatattttagccagttccattttcatcactggtagtccttctacattttgcctctcaaaacccggaagctgccttggaacgtgaaaagaccctctatggatgaagcttgcaactatttacacacattcaatctaattaggggacctggtggctggataagcatgctaagtgcccactcatcccaaaagagcctagtagtctctcagccttctctagcctaatttttcctgttatcaggtcaggcaaacaaactacattcttctatctccaagggcaaagaaaacaagctaattcaattttcttgataatatttatatgggcttaatttgcatgccaaaatggatagaaaacaaagtcactcgtgaataaaggggtggttgtattagaccctcagcctttcctgcacgagtggtttggcaccatcaggaagagcgttcatcagcactcagagagaacttcccgtatggacagcactcagagagcacgtcctgtgtgggcagcattcagggaggacttcctctatggatagcaatcagggagcacttcctgcatggacaacactgatgcctccttcccgccagaagccccactgggcctcctacactaaaaggatcaacaacaggcacagggcaactatacacagggtaatactatctccctctctatcacatcaccccctatagagaagagagaaatagtctctcctctatgaatacaaatctaaaggtcatttacaaaattaaccacatgtgaactaaaatacattagtaatcatgtacattgttatagatttctatgcagcaaagataattttaaaacaaaaacttgtcatttaaaattctattgtctcatttccttcctattactaataggctaaagaacagtgctctgaccaatcttatagctgaagctgtcctcctcttcccacccccaccttacttagccacttctctaataattctagtacgttttgaagggaaaggaaagctaggacctgccctttaattttcttcaagtcttctttaaagttttcatccttatagttcaagaaggttatcattcccacccctgttgcccctacacccaccaccaccaccacgaccaccaccaccaccatcccaaacagcaggttggtttaatacatcaactatttccttcatccagaagcaaaataatcactacagttgctcctgaaagcagacagaagtttacagaacattatcattttcacagggaaacagtataagatcaagcctgaaatgaactgagtactatgtgaagacaatgtctgctacacttatttccatacaccagttcctctctgtatgctttcaagatgtaaaaggaatttaacaatttaaataaattatcaaaaaggaatgaggggggcccccacatgggccagttatcactacagtcagaacattttctttgtttccttttggccatatgagtgactgagagagggctgggaatggtggctggaaagagaagttctggcacagggaactggaaaaacaaaactaaatgtgggaggtgaactggagaggggtgagaaactggccaggaatcagttgctcctatggataggtcagagaaggaatgcctgaggccaggatgttaaaaaacacatagctactagattaatgaagagtaaggcccctttacacagccagtgtgtctcacttatacataccatggagttaaggaaataatcaattaatcccatttgataacaaggatatcaaagcttaaaatcacatagctaattagttaatgaaactggttctcatatcttcactgttccttgtttggaaaaaaactttgcagcttctcaagactgtgaaactgaccaatagagtattaaattttttttttggctggattaagcctgtcaaaggagaggggcccatgttaccttcactattccaataaaacctaaaaataaaaattcccaatatgtttcacaattaattctcaaagatatccatcaaagttgatccttgcatgtaaaactgcaatctccacatagaaatctctttacctaagttcatgaataaaccatcattttcttatgcttcagataaaagaattaaagttaagacttgcattgttgaatacaacatgactgactgagatttccttccagatcccatcaagacattagattccttatcattcaagtatcttttaagggttggttctgtgctcctgaatgcttatcagcccaattgttctatttccttcaaaagttcttctaagaactccagcgactcgccaagttgcccactgagaactctgggccaggaaacacacaagagtttttgtgcaatttgttccatctagtttttgtaacagcatttataaggggtatgggtgtgtgaatatgaagataccagactgaagacattaaatttaaattaatcaccacaaaactagagggccaaaagagaaagtaaggggactaaggcaatgatttcaaaatttccttgccagagaatgcattcatcagaaaggaaaagcttttaagagtgggttcccagccttagctacccttaattgcattgcttataatggtgtagtacagtacagtttctaaaaatagagttcaaccaagggaagatcagggaggagggaggatgaaaagacaggggacaaaaaggttgaggaaggcttcacagagggggtggatggctgagtgagctgaatacaaatgacatgtcattaagaataaaaggggtggtggctcatatctgtaatcccagcactttgggaggccaaggtgggaggatcacttgagcccagggggttgagaccaacctgaataacatagcaggaccctgactctacaaaaaaaatttggtggcacacgcctgtagtcccagctactgaaaaggctgagacaagaggatcacttgagcccaggtcaaggctgcagtgagctgtgattgtgccactgcactccagcctgggtaacagagcgagaccttgtctcaaaaacaaaaacaaacaaacaaacaaaaacaataaaaggaatggcaaatctgaaagaaaggtgggtagagtaagaagaggagtgaccaacaaggacatagactggaaggatcattcttcacaaaagccagagaattaccctggttggttcagaggaagctcccacaagttgatgttggggtaggagtgtggtggtactaaaaaggtagtaggaagaacctaaaaagcaaggtggaatgtggacatgatgtcacaggttaccagaatctcacatgtagaaaagaatttaaacacagtaaatgaagagcatggcttctggagaatgcaaaactagaaaaacacttcccttccttctataaaaataatgtttataacaataataataaaaaaaattggctgggcacggtggctcatgcctgtaatcctagtactttgggaggccaaggcaggtggatcacctgaggtcgggagttcgagaccagcctgaccaatatggtgaaaccctgtctctactaaaaatgcaaaaattagccaggtgtggtggtgggcgcctgtcatcccagctacttgggaggctgaggcaggaaaatcatctgaacccaggaggcagaggttatagtgagctgagattgcaccattgcactccagcctgggcaacaagagtgaaactacatctcgggcgggggacggtgggggggaggaattgaacggaaaagttagaatatccagattcaagttttgtcctggccaggagcaggaatgagtattatccctggaaggctcaggtcttcacgtgtgaaataagcaggttagcctggatgatttctaagcttccttccagctccaaaatactctaaaattctggatagtgctggacagtgccatctccagataagacatatcaagacagagcccagtcaggacctttagtactcttgtctgtctgccaaatagagaaatggagcaagagtttgttaaactggcagactccaaggccaacttctgtgacatcgtgcaacttaagaccaacagacatcatactgcggcaccattttcctatgccccttaggccagcatggattcccgacttagtcataagtgattctaagaaaatattctaaatatgtaagctatcctaaaacaacaactgaagcctaaaggaacaaatgtaaaacaaaaaacaatcttaaagagctcctgaaaccagagtatccttaaggtagaaacaatattacagctgaaataaccatagtaacttaagatctatagagactgtatgttacttagcagcctgccatctttgtgtttcaacgtgtaatcagtataaagagttacatttcacattctattcaatctcttctatataaaaggaccctgtaacagctccaaaaccactttaaaagaaaattcaacacaataaataaattacagcccaaacaaacagtaattagaacgcagtaaacacaaaatcccacccaacttcaggtgcaaaattaattattcttctgaattctgaatgcaggtgtgcagtgttttcctcctccttgaatttccagatccatgccagttttcttcctcaacacagagccttgtgaaggggacaagagcaaactcttcctttactttttactcaaaataaatggaaaaaaaaaaaaaaagaaagaaaacttcctaggggaagtgaaacattacttttatcatgacagttcagaatacctctgcaatgcatttcctgcctcaccccagtagatttaggattccagggctgacaacttcctcccagctgttttttaaagtctatctacagtacagtctgtatcttagtatttcttgtaagtaatgaattaccgctgagattgtaaagtcctcagggtggaaaatacccattcaaaaacatactttctccacattaaacaaacttactgaaagtattattaggtgattaaatattaagttagaaaacttatatgagtaagcttataaaaaaaatactcccacaaaaccaacttatttatttattcttagatccagcgggacatgtgaatgaccttgcagtaccatgggtttcacaatttagcccctagagaaaaaagcattatctgtacttacaggaaactgaacaagtatttgcaatctccccataataataacttaaaaacataaaatcttatctgacaatgttgtaattttgtgtataaacatcactgagaaaattttttgaattaatataactcaacaatactgtctacttttgtttctttctcatggtaaaatctagtagcttatatctgatatgaataattagagaaagtgagtgatactagaacagctcttctattatatatcagtctatgtatttcttttttttattttttaatttatcttattttatttttttaagagacagagtctcgctctgcctcatgggctggaatgcagtagtgcaatcatggctcaccacaccctcaaactcctgggctcaagtaatcctcctgtcacagcctcccacgtagctgggacaataggagcatgccatcgcgtctggctaatcaaataaataaataaataaataaataaaaactttctttgtagagactggatcttactttattgcctgtgttgcccaggctgctcttgaactcagcttcaagagatcctcctgcctcagcctttcaaagtgctgggactacaggcatgagccactgggcctggtcaatctgtgtatttctgtgtcatgtttgcgtgtgtgaacagtcatgtttgtgtgtgtgaataaagatagaggggaagagatggctgtctctaagctatactgcctgagaatggggcttgctgggttttttttttaacattttcgtccaagatccacctcaaaagttaactttttgcctgacctctccatcctatatacataaataggcacagacatataaaactgaaacgtaagttttgtgaaacaatattttcctttaccaaatacaatgtaccctaatgttatctttcctagtatatttcgttaaaagaaataaacgctggttgtaacccactgaactgatacttcccactaatattgccacctacaggttaaaaaacagtggtcagcagcgtttctcaaactgatgtgcacgtgaagcacctgcactgttaaaatgcagattttgactcagccatttggggtggggtcaagtttctgcatttctaacacaagcttccaggttttgctcatgcacaaggcaggactcctggtctgtgtgaatgaatttgggaagggcccccttccagctttaaggaggagcaagctgcatctattcacacagtgagataaaaacctttgttccactgatttcaaacccagtatctgctcagaataacaaaatgctagagctgggaggggtatgagggatcataagagccaataattatccactagaagtataaggaaatcttgggagatggcaggaggggaagcagaggtggggacatacttgaatttttggcaaagggagcttggctttgaaaatgctgagaaacactgatgtaatgcaacccctcacttttcaggaaacctgaggccaggagaagtcaaaccacatatccaaggccatacagctaatcagagggagaactgggcttccagtcccgacactgctgtcataaagcaccagtccttgtttgttacgaggattgcagcaaagatgatggtacaggccaaattttattaatgagtttttaaaaactgagtaaaattgatatgctagacctgttaagacagcagacaaaaattattttgtgcagcctcttttatacctcagattttatccactgtcaacttctagatcacttacttagatgtccaggtctatgctagatatccagttgcttgctttaaagaaaaaaaaaaaaggaaacacacctatgaaattgataatttaaagctcccaaaaaatgctcgtgaatgccacccatttctatttttgtatttatttatattaagaatttttgagtagcatacaagatcattatctgtaccatttacaagaagatacaaaaatcaaacaggttaattaaagcagtttggagactggatgcagtggctcacgcctgcatcccaacactttgggaagccaaggcaggtgatcacttgagcccaggaattcaagatcagcctgggcaacatagcaaaatcccatttatacaaaaaggaaaaaaaaattagctgggtgtggtggttcacacctgtgtccaactactggggaagctgaggtgggacgatcacttgagccgggaggtcaaggctgcactgagctgagatcatgccactgctctgctcttcagcctgggcaccaaagtaagactctatctataaaaaaaaaaaaaaagcactttgatgcttttctgtcataagagtacactcagagtcaactaccaatttaaccggcttgaattaggaacccttaaagaatcactagaattgcctacccatggtcatgtctccctatatatgtcacaaattcatacactcaaaacaagttacttcatactctgtttctttaaaaataaaatggagagatttgtaagattgttttattttgtgaactccactgtttgcttcttcctaaagcttcacaaagcatatacttagataaattctctaaaacaaactggttttccttcagttaatgtgggccggacgtggtggctcatgcctataatcccagcactttgggaggcagagatgggcagactgtttgagatcaggagttcaaaaccagcatgggcaacatggcaaaaccctatctctacaaaaacacaaaaatcagctgggcatggtggtgcatgcctgtagtcccagctactctggtggctgtggccagaggatcacttgagcccagttggcagaggttgcagtgatcagagtgtgcaccattgcaccccagcttggggggcaatagaggaagaacctgtcttaaaaaaaaaaaaaaaagttaatgtgaaccttgcttccagcagcccaccattatactctgaagggctgtttctaatttgacctaagcattttcccatttttacagggacaaagtttatttcaggtgaaatttctatttaatgatactgcatatttggactgagtatctactgctaacaacagccctgagactttcctctgttttatggagtcagcccatgcactattgtctaatcactttagtggtgatggtatcaacctgggaatacataggtgccctgggagctaaccaaaccaaatgctggcaagcctcattcctctcttcatctcttctgaagcagataaattgaagtagaacgtcattctgtggtaagcaggatctgggaaatgctttcaatgtttacagaaatcggatgcaacattttttcttttcgttttaaaattatttcacaatattctatttggagtaggaagttattgctcaacaagaaaaaaagtgaagatattagtctttctctgcacctttttacttttctgttgctaaagctaatcataaagcatcatttcatctcttttaccaaaatgtgcacattgctagttattgaaaatgtcaaagaaaatttcttttccaaagaacctcggacaacataaagttctggcctctagaacagagacccaggacctctgtgtgtttgggggctgggtgtggagatcagtgggcaacacagaactcagttcctacacttgagttttctgatccttctcttctttcatgatatttagtttcattataaatcttttttctttgctgtgcatgatcaaacatgcaatctttcattttccattgttatcccagattaaactaattagtgacgagtacccaaaatgagttttgtaaatctcagcctttctaaatgcacaaaataagaaaatgacaccatctctcctcactcaccacagagaaacacatttatgaagaaaatgatgcctaagtggaaactggcttcaggagcctcacactcaatgactagtgacggggagcagctctctgcccacccccacctaagccaaagccaccagtgggctttccagaacaggaaagggaaaaacagactagagcccaaacatggagaaacactatggtggacccctgcccagaggacagggcagacaggaacagcattctaggtgtggcctgcagctacgccaggacctcaaagcgaagtaaacagaaaaaagcagtagcatggaaacttcagagcgccccgtacgatatcaaatcattttgctaaaaaagaaaaaatgcaggaagaggatacacaaacagttttaaaatttatatttctttaaaaagacaacttcacatattcctaaaattcaagtcttcggatctaacagtttaaatcttagagcagagcaaaaagaatgcattaagagaaatggtggtttgttgttgttgttgttttgtttctggtaaagatcggaaccaagcatgataacttctagtatggaaaacaatttaggaaggaatagacaagcttccttttctccactgcggccaggaagctggggaagtccacccacaccctcgtggcagggaacggtggcagccactctgctcttccccgcaacccagtagttgctccagttacataaaaattgctcaaattaaaacatcatcctacctttagaagaacttccatcacaaagcaaattaaatgaagataaaaatctgcaggacagtttaatcctgcctggatatgtttttttaaattaatatataaattgtaaatattgcagtgagaacttatccataaaatcctggagaggttatctcattctgctctccccaggaatacatgtagaaacttggtctgccttatagactctaactaacttcatctctgttctccctaattgcaaaattcaatcttcccttacaataatagctcatatgcaaatcctggatagcagtcatcctagaaatagataaaacactgggaacaatgttttcccttaatagggggataggtttagctctctttttacccattttagtaaaatgggtaaaaatggatctataatattttatctttttgttactatcaaaataacctaggcagtccttaaaaatagtttaataagcaaaaactaaagaggaaaaacccaaagcatgacaatttctggaaaatattttttccccagagaactaagtgttacgcataatactaattgctaacattattgagcatttactctgtttttggcatcaagctaaatgcattcttcattcagtttacagataagagaacagaaaagggagttccccaaggtcaccgaggaggtagcagtcaggttgtgaaagatcagtcgacaacctcttcaggagctgagtggaagagaaaatgggagtgaaggaggcatatgccattcagtttcaccatactgggggctttgtttgatagagaactactctatgaggcttttagagaaactgacctttgctacgaatggtatatctatgtcatggttactaaacatcttccaataaaacataaccaaaaggtttggctcaagaaactggttgcaaaacagtacaactgagtgacacggccttccttccttcctctaataccaacagcacagcattactgtgaaggattattgctagaaaacattcaggaaacctgctttcctttagatcccaatatatgatatttcaactcaacaaaaagtcagtactttctaaatggtgtttctacatttggattaaagaacaaatctcccctaccagcctgtcaacccctgcaggataagggaccaggccctgcctagtaatcccaccctatgtcttagagcctggactaagctttatgtgtttggtgaaggaacatagattaacattatgttagaaaccatgaagctgctgcagtgattaaaatgttatatgttgaacacctccagcgtataaggaggtgggtgaagttggcaagggctagatggtggtggaacctaagtatcttagaaaggagtctgaaatctggggagaaatgcattaatcatatcattttcctcactgaaacagaatctttcacttgaaatttattatatttcctctccagactaaagcatctccagaacaatttcccaactccatgacaggtggacttttaaaattcctagtttagatttcaaaacaccagggacagtagacaaattatgactgatagcaagaattataattcagaaaaaaatttgagtcctaataatcttattacctttgcatacatggggtatatgggtatctgtcttttcaaaacagattaatcagaattactataaaccttcaagaagatgtaatcactttgggatcctcctgcctttggtaatggccacatctggtcaggcagttgttattcattctttccaggatttgctttattagactttcaactgaaaaatgacaccttcactccaatccttctaattgatttttaaccttagagaagtgtgagagagttcgttagaggactaacttgttaatagagtcatctgggtggtttgataaaattctttcagaagaatcacaacactcccaccccacaacactaacgtagtttacttaatttttttttttttaaaaagctactccttaaaatgcatttcatctctttaaaacattcagttcacatgtagagccatcctaatacaatttaaatgtgattggctcctgtcaggaaacgtaaaatgtacgatttatacagtaactacaacactgtacatggacatgaacctattccaaaatttaagatgaaatatcaatggagagagtggaaagtggctgttagtttccaagggatgctgtaaccaattactacgaactgggtagattaaaacaacagaaatgcattctctcccaattcaggaaaacagaagtctgcaattagggtgttagcaggttaacattccccctgaaagctgtaagggagaagccttccttgcctcttccagtagcgactcctgctgttccttgccttgtgacggcagaataccaatatcaacctccatcttcacgtggccttctctctgcatcctatcctcttcttgaaaggacaccagtcaatggtcactggtcatctcaagatccttaattaattctacctgtaattaattaattacaaccaccctatttccaaataaggttacattctggggttctggttagacatgaattgggggggggggaactgacccactacagtggctttctctaaaggactattttatttttaaaaaatagacaaataataagtatacaaaatgatggagtacttagtgatgtttcagtacatacaatgtgtagtaatcagatcagggtaattagcatatctatcatctcaaacctctatcatttatttgtgttatgaatattcaatatcctccttctagctatttgaaactatacattattgttaactatagtcattctatggtggtatagcgagctatgtaatcagagcacatacagagaattattttacagaagcagccactacgttgtaataccaatgagttctttaaccatatttagatccagataacaactaataggtcatcttgtccagtctcatatccaaagtaggaattttctttaaggcatagagattggggatggagtaaataaataaaaacttaaggtcgggtgcagtggctcacgcctgtaatcccagcactttgggagaccgaggcaggcagatcacaaggtcaggagatcgagaccatcctggctaacacagtgaaaccccgtctctactaaaaatacaaaaaattagccaggcgtggtggcaggtgcctgtagtcccagctactagggaggctgaggcaggagaatggtgtgaacctgggaggcggagcttgcagtgagccaagatcgtgccaccgcactccagcctgggcgagggagcgagactctgtctcaaaataaataaataaataaataaaaactttaaatgtcattttttaaatgaaaaaaaattgaattttctttatggcatagaattttacctatagcatagagatttggggtgggggtaaatttaagaaatttaaaatgtcattagaaaacagcagatgtcccaatttatttctaaaacatttctaactgctacaacatagaacaagtctagtctccccttcttttaaccaactttaaatctttagtgataactattatcccccaataatattcctctaaacctcaaaacaaacaataaccaaacaatttctttggcttgggcaacttctaaggaggcagtacagcaattaggaatgaaaggatggattctgaaattacagttcatatcccaccatggtcactcactaactaggtgaccttgggcaaagcatttaaagcttccaagtctcatctcttcatctgtacagtgaggaggaggataccatctattccatactagctcgcagtgttgttgtaaagattacacaagctaattaataaactgtcgggcttgtaagaagtgctcagtaactgctacctacacttgagtccatctttctcaatgtctgatatggtttagatttgtgtccctccaaatctcacactgaaatgtgatccccactgttgaaggtgggacctggtggggggtttgaatcatgtggcagatccctcatgagtggcttaacaccatcccctggtgatgagtgagttctcactctgagatccggttgtttaaaagtgtgtggcctttccctctctctctcttgctccctctcttgccatgtgacacatctgctcccactctgtcttctgccatgactgtaagctctctgaggcctgacttgaagccaagcagatggtggtgccatgcctcctgtacagcctgcagaaccatgtgccaattagatctctttctttataaactacccagccttggatatttctttatagaaccaccaacagactaacacaatgttcatctctaaattttatttcctgatatccaggagggctccgccgagggcacacatgaccagttctaaccttaaaatcagcctatacatataaagagcttctcgatccccctcgtcctactcaggggcttggaggcttctttgcacagcctcataaaaaaataaataaataaaaaataaaaaagagagagagaaagctaactaaaacaacaacaacaaaaacccctaggttcaaaagtaacaggcaggtgaagctgggagagccacttccccagaagaggtccctggaaggcctggcctgttccagactgtcattgttctgggattttgtcacttgagattgttttatcatctgaaactctaaagagagaggcatttgggtcagggccccactttaaaatctcaaaacttccaggatgtgacgtgatgaaatgctcatcacttaggacaactgagaagagcatcaggaagggaatgtagagatgcccacgtgttctgttcggggtgcctcccttttattattctcaagcttcacagagagaagagaatgcaaaagatcatcccatctacattttttggtaagattattagatgcaaggaagatactcttcctctatctatgtaccacatgacaaacctgcgctcacaagagactcagaatggatgctggctatattggttcgaaacgtccactgaaaggctgggtttctgtggtaacctgggaaacctaggaacctggcttccaaacatggtataatgtttctacacacaaaaacatgtgttctgacttcaaaaagccaaactgaaagaacttctgaactagaatttatttgtctaggtagtatgatgatttcatttcttaatcaaaatatcataattttattaatataggtaaaactatgctaagggcgtaagcagctaaattaatttgttggctaatactcatttatagtcaaaccaaatactttgaattgaatgtttatgtcctcctaaagttcatttgttgaaatcctaacccctaatgtaatagtatagaaggtggggccttggccaggcacagtggctcacgcctgtaatcccaacactttgggaggctgaggcaggtggatcacgaggtcaagagttcgagaccagcctgaccaacacagtgaaacaccgtctttactaaaaatacaaaacttagccaggcatggtggcgcgtgcctgtaatcccagctattcaggaggttgaggcaggagaatcacttgaacccaggaggcggaggttgcagtgctgagagctgagatcgtgctattgcactccagcctgggagacagagtgagactccatctcaaaaaaaaaaaaaaagatgtggcctttggaaggtgatttaggtcataaagatggagccctcatgaataggattactgcccttataaaaacataccccagagaaccctatggctctctctgccacatgaaaatacagcagtcagcagtctaccacccagaagagagccctcaccagaacccgatcatgttggcaccctgatctcagacttccagcctccagaactgtgacaaatagatttctgttgttgataagccacctagtctactttgttagagcggcctgaactaagacatcaaccattcaggtctttttatacacctagtcatactagaattccctcagtatttttcacagaaatgcaggattttatgattatttattcctattacaaacgtgggcttaccttccagtgtgccgctttctggaagctactgttattttgtgtacatcaccactcctcctagctaggtgtcagctgaagaactgggaagcatgttttctacatggtgtacaagttgctgctttcaaccaatttgatcacaggacactgtctgtttatcaaattctaagactgtccccaccccttgatattcctggctgctttcccctctagctgttcaatagccctatatatggttgtcagtatagaagttaaaaatttcaaaatgttattagctgcagcagctggggatgcggtgatgctagtaaatgggaaaagactgaggcaagtgagattacattacagtatctagtctttttattttaatgattttttttttttgcagtcttcccttaggagggatgaataagaattgggtaaatctccacattttagcaagagcttttaatcactaaatgttttttcctaaaggtagcattaactggcaggttttagggatggtgcctgaacaagcagaggcagggagaggagccacgtcgtggtctgggtgcctctctgattagacagctgaccagtttcaggggaggaaggggtttctgcaatggcacaagccctggaacattttctgtctgtgctgcaaatgacagtctttcctactctgtgtacagcagagagggtgaggaaaagggtcaacaaaaagaaagaaaatggaaactcattctcattgctcacagtatttgggctcaatatatgctcaggaatctctcctttttgtgacagcctcccccacaaaacacacagatcctcccaccccataatgtgcaaatgcatacactgccaccccatcaggcagttactttaaaaattatatggcagacattagacaggaaaaaaaaaaagaaaagaaaaagcttttccttatcctagatttcagagagcttcatctgaacccagaggtttatgcctggccctggcatcttagctggctcagcatgtccacaggctgacctctgaaactatttccagtgtcctagaggaactcagaatggctctcatgcatcagtccagctgctccggtactacagccaaacagggttccaactaacatgtgctgttagcttttctgacgtcaatcctaagcaaagtatcccaatttttctttggactcaattttaactcagttactcataagactgtcattctcttatttggcacccatttacatttcctgcctgcatcaccccagacttaaaagatcactgctttagaagacagttcatttctcatcactgaaaggttcaaacacacagagcaaccgctctttgaggaataattcacccagtggtccttagccttcagtgagattccaggtaacccagatagcctaaaatgccccccacattgtttttgccggcgacagagggacccaatggtttacatttttaatgagcaccccaagagtttctgatgcaggtggtacggtgaggggtaaaaccaagacagcaagtctttgaaattcagagacccagtgcccctgctaagctggaagggctactccacgggattccacagctaatcggaatcttctgggcactctagctctgggtccgtgtcactcccaaagcagccccatcttgtcccttgctccacacagagtccacctttcaactcttccaaatgacacttgacttgtcactccccagcaggaaaaggcgtctcctggttctaaaactgcctgctctctgcccgcacccttcagatcctcttttgtgtcagctgagccaagcaatttccggttccctgaactgacacttctaaccaaccctccctgcgatgcgagaggttttcatggctcctctaattgacatgtagggagttcctaggttaacaggtctacaaactttattgggataaacaaattgctgggatgaatccccctggggggaggccttccacagcatacacccacacagtgacaggccagatctttctgttcctattcaggcatagagtaatttccacatgtgctcatctcacaaactgtctccatccttactttagttgacgtgattgtttgtggcaaaaatttcagaaaacagctgtcctggtcaacccaacgacctcattttaatcagaaagggtggagcacctctaggcgcatccctgacacagagcactgtcacacactgacaattcttgctgagataatgaccgataagtatacctaacttcacaccctggatgtgttctggaaaaatttgatatgagcaaatccatgttttaaatgtgatgaggaaacacaatttttaaagaaagcctgagaaaaataccagaaaatgctgtgccctgcaaaatatgcatgaaatacataaatgctattgttacaaagagaggttccagtgctcaaagatattaaacaatctagctggtaatgataaacatacctaaacaaaagcttaaaaaacaactcagcaggatgggcgtggtggctcatgcctgtaatgccagcacttcgggaggccaaggcaggtggatcacctgaggtcaggagttcaaaaccagcctagccaacatggcaaaaccccatctctactaaaaatacaaaaattagccaggcggggtggcgcacacctgtagtcccagctactcaggaggctgaggcaggagaatcgcttgaacccaggaggtggaggttgcagtgagccaagtttgcaccactgcattccagcctaggcaacagagcaagactcttgtctcaaaaaaaaaaaaaaaaaaaaaaaaaaaaaaggcaaaaaaccctcagtaattaaccaacaatcacataatgaggaatccttttataatgaaaattactagttttttttttttttcaatcaatccatctaagatgtgtcccctgtattctggtggggaggggaggagaggaaaattttaccaaaaacctgaaggttgagaaaaactaaagagaggcccctctaataaaacatatgtacatctttaaattcttacataagactcaagaaacttaagttttaatgctacttcatattcttacagaattgcagctctgtaatagctttcaaaacaatcttacaaatgggcaagaatattacaagaactcactcccattccctagaggtaacctgataccttaatgggtagtggtgcaacccatccctttctcaagacaacaggcattattgcttttccactccacccacttacacaccccaagtgagatgtggtggatgaaacccatcacatcagaattgttctaatgtaataaagagcaggaactttaggaaaaaaaagagatcatctgcctggaagaggtagaccttgaatttcaacttaaagaagagagggacacaaacttgaagataggacgctgtagttctgtggccagttgtgatagcctaacaaaagcttggaggagaggaaggaaagacttcagaaagaaaggaagggctcaagactgatggctcatgcctgtaatctcaacacttcggaaggccaaggcaggaggatcacttgaggccagaagtttgagatcagtgtgggcagcatggtaagaccttgtcactatgaaaaaaatttttttttaattagccgagtgtggtggcacacgcctgtggccccagctacacagaaggctgaggtgggaagaccgcttaagcccaggaggttgaggctgcagtgagccatgtgcatgccactgcactccagcctgggctgagacccagtctcaaaaaaaaaaaaaaaaaaaaagcaacgaggaacttttggctggaatggcaggtatgaacttgcacaaagcagaggatgggaagaaaggggcagtcactcaggatccttgaaggctatggacattgccatagccattaacatatttaagctattaatatttctgtaaagaaatatcttctaactgcaagttaaaaacaaccaccaaaaaaaaaaaataacatttccatatacattatgtacaacagagccaccaatataatacttctgctatggaagctaatgtgaccacaagtgagtcatgaagtattttgcatttatttcaggtccaacaacgtgcccagttgatgaattttgcctaaattgaatgtctctggtaccacattgttatggggtgaattgtatgcacccaagaagacagactggagtcctaacccccggtaccttggaatgtgaccttatttggagacagggtttttacagaggaaatcaagttaaaatgaggccctaatctagtatgactggtagccttattaaaatgagaagtttggacacagacaggcaggcacacagacaggcaggcacacagacagaatgtcatgtgaagacgagttatgttgccacaagtcaactactagaagctaagagagaagcctggaatggatccttccctggcaccttcagagggagcatggccctgctgacaccttgaactcagaatgctagcctccaaaactgagaaaattagtttctgtgtttaagaaacacagtttgtagaactttgttatagcagccctagcaaactaatactcaggtgcttcggtagtctgcttgggccaggttgtcctgttgactagtaaaacacacattttgccataaaatatttttaaaagaaaaacattaatattttgcttccatgatgcaattactattttaccatggccttctgtctcaccacttcagaattatggataagtcttagggattcaaaacaaaaataaccaatgtagggctgggcacagtggctcatgcctgtaatcccagcactttgggaagccaagatgggcagaccacctgaggtcaggagttcgagagcagcctggccaacatggcgaaaccctgtctccactaaaaatacaaaaattagccgggcgtggtggcacatgcttgtagtctcagctactcgggaggctgaggcagggaggcggaggttgcaccgagctgagatcgcaccactgcactacagcctggggcgcagagggagactccatctccaaaaaaaaaaaccaaattaattaattaaataataaccaatgtagtaacgattacacagatatgtgaaggatgcttccccaaataaaaccaagcaaaagaactatctagtcaagattgagctcttaatccaaaaccttttaaccaaacctatgaatcagacctaccttcacttggttttattttgtacctacctatactgatggtgctaataagtactatctggtttgggtttcattttctttcaagtccttctgtgcatcttctggtaaaagtgtcaacaaagaaggatcctacacatcaggggtctgcaaactatggtctgccggtcaaacactgcctgcagctggcttttgtatttaaagttttattgaaacacaaccatgcccatttgtttatatattatctatggctgctttccagttacaaaggcagtgctgagtaattgtgacagagaccttatggcctacaaagcttaaaatatttactatctggcccttcacaaaaaaaaaaaaaccctgatcccaactatagatagtgtatgaaatatatgagcagttcccacgtaaacctttattgcttgtttctctcgattgtcaataatcccaattccattagtactattttccaatcctatttcacacatttcactagagaacaataaaaagaggaagggcattctagcactttgggaagtcaaggtgggagaactgcttaagctcagagtggctcaagaccactctgggcaacatagtgagatcttatctctacaaaaaattaaaaaattaactgcatgtggtggtgtgtgcctgcggtcccagctatttgggtggctaaggtgggaggattgctccagcttgggaggttgaggctgcaataagacatgattgcaccactgcaccacactccagcccgggcaacagagcaagaccctgtctcaagaaaaaaaaagagagagagaaaggacctcttagaatgttaaatactaccttcttttttgcttaaatttctcttaatgctcgccagtttttctgcaccccttttaaagagataaaaccaaactcggcaatgaattgatgtcaagaacatggaagatatatttcctttttttccctattctaatttagtatcctaataagcagtttcatagagtcagttaaagggtagactaactctaaggtgacaatcaacacaaaacagcccattgagaactctgtttctatacaggaaacaaatcaaatgcacctggaagaaaaatggtcaaaattcaggtaaactgtagcatgtcagctgcaaatcagacatgttcttactaggcatttcttaaatatctgaagctcttatggcactaatttctaacttatatagttatttatacacttgctccatactctctcttagactgtaaggttgacaacaggattactaatttgttattgccctcagggcctaacacagttcttggcccataatgtactctaaaatattgactgaatgaatgataatccaagctgaatttggttgaaaatggccaagctggccgggcgcggtggctcacacctgtaatcctagcaactttgggaggccgaggcgggcagagcaccgaggtcgggagtttgagaccagcctgaccaacaaagagaaacttcgtctccactaaaaatacaaaattagccgggtgtggtggcacatgtctgtaatcccagctactcgggaggctgaggcaggagacgcacttgaatctgggaggcggaggctgtgatgagctgagatcacgccattgcactccagcctggacaacaagagagactccatctccaaaaaaaaaaaaagaaaagaaaacaagaaaaagaaaaaaaaagaaaatagccaagcttcactggcagtcaggatctctgggttctagtcctggttttgttacaaataagctatgcgatgtcctcacctctaaaataagtactgggaaaagctcatctctgggtccttttggcctagtatactacacttcttttgtaataacacattatatactgaacattccttcagatcacttcatccgaaacactagtatcacatcgcagaattcattcaggataaaatttcatgttgtagacaccagaaacagttggtgagggagaccgacagacttccacccacttttcgttggactatgcaactaagaaccttaatatagatttttttttagatggtacaagtgaacaatttagtctagattacctattataacaaaggatgatcaagtggccattcagaattttcaagaacacacagcagtgtgttcctcacagacgagccttctccacagtagggttgtaaagtcctaactgtggtttcttctatacaggaacttacacctagaaaccacagagtaaattctgcatgctgtaataagtcaggcaggaagggactgaaagtatgcaaatttttctacccacagccaattatatgagaaagacaaaacaaatttagaggacaaaagaatattcattattagaatgtgtgagttttccagatcactgacattttaaactagattgatttctcaagtcagctttcttgactttgtaaatgctttaaaaagcaataaaacaggtggaaaaactgaccttaacagaggagaaattaaaagcaaaaaaagaaatgagagttggcagatactagtttattttgcctgaagttaacatgcaacttactattgctaaaggcctactctgttcagagaatgactttttaaacctcacataaaagcaattctgaagttctatcaatgattttttaaaaagatacactctttaacattcattagaaaaacattagtgcaagtgtgtgccatacttagaaaaacaaagattttaaggtaggatggtgaagcactaagtaaaagtcagaagatccagcttttcaagctgtgagaatttaaacaaatcactcaatgtttctggattttaattatttaggagtaaattaaaggggttgaacccgataatctctaatgtcctttccaacactaaaatgcaaaagcttcttttaaataagtggttcccaaactgttccaagaacacaattagtaaatattctaaaactaaattattccatgatcaagtaattctaggaaaacaaatcatgaagtcagacaaatatctccactgtaggacttcttgaagactttttactgctaatttacacttttactctcctggacaatactacatagtatgtagtgtttccgaagtttctttgtaaaatgagtattttaattccttgaacactttcaacctttaatagaatccgtgtatcttagtaagcacaattaaggaaagcagctttgaacaataaacttctgaatttaaaatcagatgctgaaggccgggcgcagtggctcacgcctgtaatcccagcactttgggaggccgaggcgggcagatcacgcggtcaggagatcgagaccatcctggctaacacggtgaaaccccgtctctactaaaaatacaaaaaattagccgggcgtggtggcgggcgcctgcagtcctagctacttgggaggctgaggcaggagaatggcgtgaacccgggaggcggagcttgcagtgagctgagatcgcgccactgcactccagcctgggtgacacagcgagactccgtctcaaaaaaaaaaaaaaaaaaaaaaatcagatgctgaaagaaggaaaatgctcacataatagtcgagggcatctatttcagaaactgtaataacatctccatagtgtttacatatcataaagcactttatcttacattaactcttttgacccttaaccctgagaagcaaggacaaatataataatcctcacaagtctttctcatcacaaggattttcggctagtgaacagaatgatcacaattttcttccacgattataaccgtaggctttccttgacccttcctccaaaatcctcttttgtatacaaactgacctgttaggagacaccccaaggaaggagggaagcatccagagtacctgtgccaggtaatgtgccacgtgctgtcacccagatgatgtcatgtaatcatctcaataacactgagtaactattacccctggttttgctgccaaggaaattaagacccagaaagtttaagaaatgtcccttcgagtgataagagctgggatccacaccaatgtccaactttttttctttaaaagcaacctgtgttttgaaatggtttgatagtgaaatttttttaaatggacgttggccatgtggttcagttgaaaaaaattaacactttattttggtttgtgtttcatggtttgtggaatctgtttgaaatatgatttgatttacacaaatattacaacagtagttagagggaggtgtaatttatacaagaacttcatcttaataattacaaccacctcagttcttactaggtgccagacagacccatatgtactatctcatttaatcctccaaacaactccacaaggaaggatcccaggactattctaccttcaaggcttttacctcagaacttcctctctgaagcagcctgtttcacctctctctcccagggacttttctttttatctttttttttttttttttttttttttttttgagatgaaggaagtctcactctgttgcctaggctggagtacagtggcaccatctcagctcactgcaacctccgcctcccgggttcaagcaattctcctgcctcagcctcctgagtggctgggatacaggcaggcgccaccaagcccggctgatttttgtatttttagtagagacggggtttcaccatgttggtcaggctggtctcgaactcctgacctcgtaatccgcccacctcggactcccaaagtgctgggattacaggcgtgagccaccgcgcccagccgtagggaatgtctacctgcgcatgcacgtggcactctctgaccgaggtccggggactttcccctaggcggaaggatcttatcagaatctccatgccccaccctataccaaaagctcattgtctttcttgatttcacgtttccttagcctttggaacagtgctctcaattttcagagcatactcatcttaccaatgtcaaaccctatataaacccattatccagatgctttcccttacttattgctcgtggagggtcaggataccatgccaactcgtacctctgaactcccatggctccttactactgcttgagtcatccttgcactcatttctgtttgaatgctcaccaaattcccaagagcattattccaaatcttttgtcatactccttaaactgaaaatcccatcttttttattttatagaatctgaacagacaacctcgcctccttactgaatcctaagctttcataaaaaggtgagcttcactggccttcctgccttctctagcataacccattttctccttcctgtaatcactgtcaggaagacttctgaggagccctttcctgtaagactaatcctgcctcaacctttcataaaagtaagccctatttccaaatattccctcttttttctagcaccttgctttacctacaaacacagatgctgaaataatcttgtctctaggctgtcacttgaaattttcaggaaaaaaactctctttggcgtctgactttcctaaagacacaccctcttcattcattcactctttaaaccctttggaatgtgcttccctcacccctgcctccaccctcctttcccgccccactacacacacaggactccactgagacttctgttttaaaagtttacaaagacctcccaatgggtatttccaatggccctttactaggcttttgtctttcttgacctcttggcaacatttaatggagctgaccacctcttcttaaaactttgttctccttggcttctgtgacactctccggattctctcagttttgtgccacttctttcctcctactttgcctaaggctcccccctactcctgcccaatatagaatctgtgctccccgaagtctgtcccatctcttgtcttgacacattctctcctcggagtgctttaatccattcccaatgctccacctattaaatctgagaagtttctgtgcttcttccccagagctccggttctctaactgcttgctagaaatttctgcctgggatggcaagtgggaagaataatgtgtaattcatgtggacaagttaaaatggccaaaccaaactcactgcctttcccccagaaactcttattttggtaggctgaatactctaaaccactcaccactatatctgcccatcttccatattcctttgaggtgggagatgttttaatataaccaatgtacttgttagactatagatattaaaggtgactgtataattatgaatgacgtatattaccaagaatgaaatttgccatataacaatgtgtttgagaagatccaggacaaacacgaaaatccatgcagacatgtgaggcagcttctactctgacttcaaggtaatctcaagggagtggtaaagaaatgcttacaaccatctccccaaccaaaataacttcttaaagtggttttcactaggggtgtgtgattagccatttaggctggacgattcttccttatgagaaactgagctggacactgcaggatattaagtatccctggtgtctggacaccagtatcagaattcaacaatccctctccaatttattttaatagcaaaataataacagtaataataataatgatgatgatgatgtggaaaatccttgtaatagaaaggctgggtttttcctcatcactgagccccagagcaaaaaaggttgcagtaacttttcattttcccaatcatttacgactagaagcctacgatggtctattcccgagaccttcccctccccatccagccagtcaccagccaaatcttgtcaattctttctacacaatatcttgaatccattctatttaatacattcacactgccacattttacatctttatttcaactgagacaataccttctaaactcaggctctgctctcacccattttagcaagcttgctcctattgacctctgttcttcaaactctaccctgcagtcaacctaacctgaactacccactacttccctgataaagcccatgttttctatcttcaaatctttgctgaatcaatgttctttttacctgaaatgtcgccttccatgatgcaaccaattatcctgtctcctgagttagaaattttgttcaagttcttctccctctccttccaaatgcagtcacgagaacttttggaggacacagatccctctgacaaatggatgaaagctatgaatctctaccaaagaaacagccaatgtatgcacattttgcatacaattttaagggcttcctgtatttcagtatctataaaatttggtcactcctcctgcctacaatttaactgacttcttttgggtcctcactagctctcagcagttttaacaactagctagctggtttccctgcccagtttctcccctaatgtgcaccagtattatctcctgcatgccaccagtttacttcgcaaagattcctgtatgctttttttttttttaaatcacttacacctacaactcaattaattataactcaatgtttctgagcccctcttaaactttcagtttaaacaaaagaactattcactgtcttagaattggtctgatacatttaacatataaaactgagaatacaaaatagagccaaagtactttctagaatatctgaattggcagggttgggttgatcacaaatggtcttccaaaaaggatttataggcagttctccaaagaggagagagacaaagagattttgtcttagaacagagaaagaaaatgctggacgataggaccgataactaagaaaaaaagggggagatttaagaatctaagacaattcaaaacaatgaggctacatatttgctcccaacctacacagcaccaaaacaatgagactggaaccaattttgcaaagtgatacatcaactagcaaagtaagaaacaaacaaggtaagagtgctttcttctctcttagcccctacttccccttccctctcttcagcactccctgctcctccccatcttgctctggagctttgcagcctctgcagtgcacacctaaaactccccagacacactgaaaactcccctgggttatacactaacagctgcttctacaatgctgacattatctgtaccttgtacttcttacagaaatccttactcttccattatacattaaagaaacctctaaagaagccacacctcccactgcacggccctttcaaaaagggaaaagcttgcacatgtatctcggaactggaaattaaattaaattaaatttaaaaaacgaaagaaacaaaatgaaaaatacaaacatatatatgaggaaaaaaaaaaaagaagctaagagccaaaaagcaagtttgcaatgaagacaatcatatgtattcataataaaataaacccaaaggattccaacataggtaggacagtcttggcttgtcacatttaatacagaaattaaatgtggagaaaatttatctgtccacaaaacagctgtaagtcaaatgaaaacaggtgattgtgataatgcctctatatttagaatatttagaacagctactctcctgaaaagtaatctagaatatgaaatttcatatatatagctacgtttccccctcactaactcatgtacataaatttgtgccttaaaaatgtttcaaaaagtacagaaggcatatttaaaatatgtataaaaaataggaaaattttaagttattaagttaaaaagtatctgtcagaaacaagtgatttctaaaaaggtaggacaggagtttgcaggaaacaaaaataatacataaagaataggaaaggaccacccctcaaaactcaggcattagaaacaagcagtaccttcatgcgtgattgaaattctcaaaatgaattctttgcaatttcaccacaattttgagacatttaaaaaatacaattttctaggtttcgttttgttttgttttttcactgtctttttcttgatagccaaaggactgcatgctcattgtgggggacaagagagactggatggttgaaaaaaatgtaaaggatcataaaaaacagtcatttgtgattctatagcagaggaagccatttgttaatattttggcatatttccttccagtttttaaaaatacatttttgagattgtattgcatatacaattgacaaacaaaagataatcttctctagtttacattacactgttatgaaattccatatgtttaaatgaataaagtggagccaacatagatttctatgtattagggtactgttctgtgtaacaccaagtttcttgctgctgctgtcgttatattaagtgttaagtcccaacagttatattgattttttattttagtccaggatttcatttgctccatttaattctttcaccttatcctaattccaggaaatgctttcttcctttcctcacagtgtgttctatactattttaaagtttacaccaagattttagaatgtgttaagcaaagcattctgtacagatgcgagtttaaaaacaaacacccactaaacacctacagatgtccaaggacaaaaaaaatgtttatttttctgagtaatgcaaagacgatatctttgaaaatcaaatacacaaacaagacaaaggaaagaattcaggaaataattgtgcatatactaataatcaaacctgttttccagcaaattaaaaagtagcatttttcactgataagaatgatcaatgctctttttaccttcctaatatatttgcatgaaataaagaagaaaggattgaaagtcttccccagagaggaagcaaattctgctatcgagggcataaaccatgaccaactgtttaaaaatatggtgggatccacttttctacttcttggtactttctttttttaaaaaaatgtggttgagaatttcattttcaacctcaggtccttaccctttttcaggctgcccctcattctaaacacagtccattcttagaggctgtaaacacggtccattcttaggcgactgtgtcaaggtctccctagaccacacagaagtctcctaggaccacccgctgttgcttgctctgtggggacattaataatagcaccttagaaggattaacaactaccctgtgaagtgggcactattatctttacttagcagaaactcagacttagggaggttaagtgaaaaagcatgcaaatggtagagccacaacttaagccatagtctttcaattaggtagagtgcaggcggaagcatggaccaaatggttcaaggaggtaaaatgtgaaacgtgcgttatcagggcctaaggaatatgctaaggggcaaacttttcagtggaaaaagtaatagtatgtcttattatcatgattttttttataatgagttttaaaaagcgaattggatttccctgagagagggctgctagatttagcaaattcaaaaatgcagtgtgatgaaaatctgggacatacttatactaaaaaattattcactgtttatctgaaattcaaatttaactcagtgtctagtatgtcatctgtgaaagcctttataaaacaaacaaaaaaacactaatacattcaagagctacaattcccacatctgaaatctggacactgtgggccacatgtctttgggaggccaagtaaagggaagtgtagtgaggccacagctgttcttgacgggctttctttttcctagtagcagacacagcccttgactccagggacctagctttcaccatgtaggccacttaagatgtcactgcctcaaaactccagaccttctctatatggatgctatgaagattaaatatgactgaggtttatacatccttaaaatatttatttattgggtgagtactttataaatatattctcagaaacctggatcagatagactcttaccctcctaagaaaggtctcaaaaataaaagtactaatatatggtgagcccagttgacagtaatctctaaaaataaggaaaagtaaaaaactagaagtatgttcaaaacctgaagtgaactatggaacatgtaatgagatgccaaaacggtccctagtagaaaaagtggacaatcacgatgaattgtacagttttcaaatggctatgtatgggtagattttaaaatatcatcatcatgactcatagatcctacctgaccacaaatacacagagataacataacataaaaatgggccaataccttacttatacataccaatttacctttctgctactctccactaaacctccaatctctgtagcttgaagacgtttactttctttaaaacaacaacaaattgggactgtttcaggcagtgttcatttaaatatcttctatgcacaagtttaatcttcaaactttaacaaaacccaatctactaaacacaaattgctgtgaacagaaactgcctgaagaggattaatcaacagctttgtatgtcatcctctaaacaaggccaaacactgaatcactgttgaattcctcacgtgcagctacacccagttaatcttgaagaaggcagtaaactatgtaaatctacttaaactgggaagataagtacttccctcatcaaaagttagcaacatttaacaagtacaactattggagggcaagaccattaaacacacacagatataaacacacacatacacacatgcagaaaaattttgcattcactcccctacctccaaaaccctactggaaaccactaggacaacatactgcttagcaaaaaaggccttcctacatgccacgatgtgcagaaaccaaagtatggttggtttgtaacttagctacctcaagaaagcagttccaaaatggaaggaaacaggaagaggagtagctaataaaagaattcaagaaacaacacaaaggaaaaatgaaaataccaattttctatatctaaaagcctttgagtataaatcactttttttgtttcaaaacacactaaaatattttcatagctacaaaagtcctgataaatggtttcattttggtttttggggtgctcttttcatacgatcagattggatttgcttaatgaacaccatatacttcaaagtcacagtcaacagtaatagaacgtacacatttgtccactgagacttgaaccaatcatctttatttagatactgcctactcggttatcactccattcaaaagcttctcactttgacttgagctgagcaggtgtatttctaatgtgctcacaggcctgtgaggcaggaaaatcctgttgatcccagatgatgccagagatcagtactccctgatgccctagctacactacgtgggggcaggtgagagatgagtaccaaccaccgctgctttaactgaaactagctcactcctacacagtcgaccctccgtataaagaggttctgcatccgcctactgtggattaaaaatatttcagggaaaagcaataaaaatagcaataaaacaatttgaaaataatacagtataacaattatttacatagcatctacatagtatcaggtattataagtaatctagagattaaagaatacgagaagatgtacataggttatatacaaatactacgcaattttatatcaggaccttgagccatcctggaaccaatcttcctcggatgctgagagatgactgtatatgtaaaatgtagaaagctttaagagttgtacaatcattcagtacagccacatttttatatcaatgctgcttccaaacatcacaaacttaccatctgtatcatccatttgcttcatcattcacctcctagctcacaagttctccctccccaaaaaggtgggaggaatccctaaactggacttctgagattagaagggtgatgggctatgatgcagataagttctctatgggttgctattgagcagtacatgtaggcaggcagccgtagtgtggtggcttggaagggagtgattgtcagggttcaaatcctggctctgcactttgagttgaatagactttgggcaatttgcttaatctatgcctcagtgttcttaattgtaaaatggatatacaaatattgcctgcctcacagggcttttaagatgactaaatgagttaatctgccaaaaacattcagaacagcaatcagcaggtagtgaagtactcaatgaaagttagctactactactatgtatgtataatgcaagtgtgattccaaaccattacggtgttttttccaaaggtgactgtaaagtattccttacattccattttttttttttctggcaaattagctgagatcagctctaacagctgattatgtatttctagactaaaatcaaactgcatcatatacctaaaatctgccaattctttcatcaaaatgaacaaactaatatgaactgcaaggttgaagcttaacatcacaaaatcttataaaaagcattaattagacttcccatttaggctaagccaggatgagatcacaaagtcactcatggtaaccaggtccccgcgctggaagtgtgctttcccagtgaatggctaaatactaacaaaagaaacctttgactcaaataccactggtacccggggtcttgtgtctgtataatgcctacacattcatttctttctttgcctatagaaaaaagaaagtctgtttgtttttctgattcagtcagcccttttagtctttgaatctaaggagagccctgtgaaaagaagagcatcttatcagcgtgctccagaccagcaggctaccccccttcacacacaaaacctccagcccctcacagccaaaggcctcgccctcagagccttttccccatttcagagctaacaccccgccgggttttgacaacaaataaatgaatacacaaggccctaacataattagccatcttttcaggtagagtgaggtgggtgggggaggaggggttgcaaggggaatgtttattgtaaattggctgcatttatgaagttgatgtaagtgtactggatccgagagcatttcttttaaatgaagccacatgaaatgacttcgagatgcctgcttctgaatcttgactatcttagcatatccttcagccgagtcataaatgcagattttatttatttaattaattaaaggaaagaacttcttaacccaggtaaaagttccatggacttccacatcaagggcacacagaccacggtgtgtgtttactgcctctttaaagaaaagttaacatagaaaagaaccaaagaccagaaggcagaaaacatttcttttcgacactgccaaaatacttgcaaatacacttacgctaggacatacacacaaaaaagaatgactctgacgacaacaagacctaaacataatcaataatcctgtaaatacctaaagggaagccaccaagcatcactgccatcggtcgtgatcttaagagagccacggtctgcatggaaggctacagttcgcttgcatcctttttgggataataacttaattgatttgtctcagtggctaaggatgcagacaagagatttattatggaggaaaaatatctgcaatcctgtttttgttttctcaacaagcatcttgccactgacctctaaatcaatttaaccttttctaaacagacttgcacattttttagataatttaaagctacgttttgttattgctgctgctgaaaggctctgtgagatgtatcacaacatggcttcagtaaccttcttttaaaaacaaagatgaaaaacaaaaggcctcaactataagctcccagctccattccttttcccagcaggggattgtgatctaaccactgaagtggctttcgagttcaatctgttaaaaaatgtatgaaacggtattaaaataggaaagagcatgtgtatgactcaggcatatccaagtatcttctgcaactaggatgtcacaggatttccctgtgctactgaaaaccttgagaaagtgacagtagaagttcctgtttctttctctttttttttctttaaatgaggggggcgcgcgcgaacacacagacacacacagagacacagacacacacacacagacacacgtcttccgggtttcctacgaatcagacaggttctctgaggttcctagcgaagactgcacaccagcgtgacgacttattaccgcactccgctacacacaaaggttttgggaaaaacccaaacttgttgcagagctgggtgaagcccccggcccggcgcgcttctgccctcgccggctctccgctcctgcccctgccccttcctccacttcccaccctgcccggcccgggcggcggcggcgagggcatctcccctgctcaggtcgccggccgagcagtccccgcggccgccttcctgggaaacaaggtcaccgcccagccggtccctccgaggaggcgcggagcccctgagcgcggccccctttgtaacgcggggctcgccgacctcggcgcggcatcccggccgccgcctcacctgcttgcgatagggcgtccggcagttgctgctgcccccggggttgccactgctgctggggaagatcatcgctgcgggcggcggcggcgggtgcgggcgcgggcgcgggcgcggggcagcctcgccgcgagggggagggcgcaaggaggtggccggccgggcccggggccgcggcagctctgggaactccctctcgccgcgcggcggcggccggcgggggctgcagctccgcgctgacttcccctccgccttcgacctccgcactcgcctaaaagtacggcgcggcagcgggcgagactcgagcagctcgggcagccgccgccctgcgtgccatggacgggagttcgcgcgcggagctggcggcgtcgccgactctcccggcggcagcggaggagcagcgccgccgcgtccccacctaccgcggcctcaaccaccgccctgagagcgcgccggccgggggcggggaggcggcagcgcaccgcctcgcgccgcgcccaggcccacccgcgcctccccgcccgcccgctgggcgcggcgcctgccgccccatcgcccgcccggcccccgcgctctccctcccgggatcggggccggagccggggccgggcggcccggggagcagccggcgcccccgctctggtgcaatggttgggtctggctccccgcatgccgcacattcctcggagtagccaacccccctcctctgttctttttccccctcggttctttcctaagcaccagcggcagctttgcaccccggctcgaagccccttttaaggtcgtcgcttcggggaccactctggcacctcggtcttccctctcttcttcacctttcgaactaggccccccgcgccactcttcaagaaaaggtgtggacaatcacccctacttcaacgaacacacgaccctcccgtcaaacctctgcaaatctccatcccccgattcacacgctaaaattttagcagaggaaacagctctccactccccagcccctcacccaaatacgatcggtaaagttttgttttatccctaagccagagtttaccagctttccttcaagatgataatatcaaggagcgaaaatcatttaaggccaccggtttggtaaacctttctccctaaaacctggaacagtgtaatccttccttatgttaattattagatgcgacacaaatgtgttttcttaggacacagaaactcggcaaaaaagagacaaagggaggagggacttccctttgtttcccgatgtaaatgacctacggctgctcaagccgtcccttttctcgaccacctttccgtggacgtatgaagccccgaacctgtgcagtgcagaaggcctccacagcagcccggactgacagagcctgcggtctctggataagccactgggacgggcttgccatccttcacattggcctgttccacggtgacttttacagaatactatcgctgcagtaaatactacagagttcttccttggtttctggtctcttaataccttcctggaaaggctcatctgccatgataatgaaaaatcctaacttgtctaaaaagtgaaggcgtatgccttctggcttccctaaggaaaacagtgtcccctatggaaatgaagtcttctggcaaagctgtggccattcaaaggcttttctagcagcaaggaactggaaaaaatattcatcctagatatcctgctggtgacttagtgaacctcttccatactcaggctcttccaacattctccagccagataactggaaagcctcacctattataaataaccgtataaaacacacatgtaattcctgattcttttcattaaaaaaaaaaaaaagcaaagtaacttattctgggcacagtgctaggtgcacaatggacgagtaagaacttgccagacaaaatttacgtaaaaatctgtcctttaaagtgattaagtatcaaacacagtataatgagcattcattgaaaattggtgtatctggtggaactattttctgctactccatgcataagacaactgttttgacttcccttttgctgtctcctctcactaggaccctttactgcaagttatcaagcacaagtataaaatagaaaacattcatcagaatgttcaagtcataggtgcctttctctgagaacttactgctcaacaccccagcagctcagacctgtcgtctgtgcatctatggaaaaaattccctgtacaacctcagttgtcaagagtggtctcttaggaaaccacaatgtaaaccacaaaagaagagaatagattaatttttctatggctgtactctaaggtcatgatattttggatgctgtgcaatccagaatgctaaaatttgattggatacactctgcaatagttttatggggataagaaaagtttttaagtgatgatgaaatttaaattagaaaactaaaagaattctaatactaaatactaagatatactaagaatactaaaagaatgttaaaaagactctggccgggcacggtggctcacgcctgtaatcccagcactttggtaggctgaggcgggcggatcacgaggtctcgagaccatccaggctaacacggtgaaaccccgtctctactaaaaatacaaaaaattagccgggcatagtggcgggcgcctgtagtcccagctactcaggaggctgaggcaggagaatggcgtgaacccaggaggcggagcttgcagtgagccgagatcacgccgctgcaccccagtctgggtgacagagtgagaccccgtctcaaaaaaaaaaaaaaaaaaaaaaaaaattaaaagactctaagactagagaaggatatctaaaagccaacaaaatgtatgttctataatggtgaatgacataaaaggagagaatataaggcatatatgttttaaaaaaacaatgtccaccggggttcaaaagttccaaacttaactaggtactgtgttcttaagtaaagcattacaaagagataagatagattgtctaccctcaacaaaatctaaaatgtaatgaagtcactcaaacacaaagaatgcaacgtaagaaaaaaaaacataactatgagaccctgtatataacatacacactcaattatagattattcataagtgcttagttgtaagagtgattacagggacagatcctggtgaggttcatctgaaaaagttcctcgacctttgaaacaaatatgttctaacacatagaaagtaagaaaacagtccagagagactgcaagttatcatggtaaaaacggggctttggaagaacctgtcctagagatgctcatcctcttttttttttgagacgaagtctcgctctgttaccaggctgcagtgcagtggcgcgatctcagctcactgcaacctctgcctctcgggttccagcgattcttctgcctcagcctcccgagtagctgggactacaggcgtgtgccaccacgcctgtctaatttttgtatttttagtagagatgatgtttcaccatgttggccaggatggtctcgatctcttgacctcgtgatccgcccatctcggcctcccaaagttctgggattacaggcctgagccaccgcacctcaccaatgctcatcctctttcaagggaaacagactttgctgcctgggctgtcctatgtcttcctccctcacctcactcagctggtaggtaaagaagctgtgggaatctgatccaagggcaactgacaggccagtgacctatgacctggctgggactgaaaaaatgagcaggaccaatccaattctcacccttggggatttgattctgaaaacttcaatggctgaaccagttactaaggggccagcaactataagagtgccaggggtagagttgaggccacaacaagccaaaaccatatgcaagccaaggttatgaggaagcagaaactatgagtaaacaggaagcttactggcagcgggcagagagtagagcatgccaggagtgggtgagcatttggccatgaaatgatggagggggctgcagtccctagagctgctttggctcttaagacttacaacagcccctccacatgtgtacttaaaacacccttcttcagaaagcttaaaggaatctggactttgcaatccaaggaacagaattaaagcagaaccaagcagatctgggtccatatttcagcttcccacttgtgctctgggcaagtttgctaacctctcttgagtgccagactcctcacaaaattgtcttaagtacagtacatggacaaaagtgtcaaactcagtaaatggcagttgttgttatttttttccaggttttatcatggtgatgcctagatttaaatggttgcactgtgcaaataactgatgctgaacatcaaagaacaggagcaagggtacagcaggaattaagcacaagcaaatttaggcaaggggagggcatttttgtaaaaaactgttaaatggctgaatgaatattctttctaaggttgtgtatactgcagatttaactttaaaaggaaaacgaaagtctaaaaaaaggtctgtttcaagagcctaggtgcactgaagtttttcttcatctgtttttgtccagtttcctttaaagaagttaggtgttggagaagagccatttttgaatgaattggaagactgtgagcagtatcagagatcactctcataagccaggaggtgtataccaactagaataataaggatgcagccaccagtacatgcagaagcctgcaatctaaaataggagatgacacacataggtaataatgccttctgccacttaaaagagctcatatacctgaaattagagaattgaatttgaaagacatttgtcccaaagcaacaattttaaaatgaaagtttcatttttaaacctttcacgtctcatttaactttcacaacaacctttgaggttggaagggttataagcctcaatgtacagatgaaagaaaaaaagttaaggctgggtgacctatccacaaagctagtaagcaagtagcaaactaggattaaaatctagacctggctagggttaaaagatttactaagtcttatgctctctaaaactctgtaacgccgcatctcaaaaaaagccttatagatgatgatgcttcaattcctaggtgagtacttgtaaaccatagagcgcccaaattgcttgctgtacactaataatgcaagacattaagtgataagtgccaggcaagtgttctagacaatcgtgtgctatgggagtccacagcagggagagatcaatattggatataacatgggcgtgggaagctcaactgtataaatgttttgttagaaggatactcagaaagaagcattgtgcagatgatcagaaaaacagaactacagatagaaggctagcatgagggacaatgcagacttggggtaatcactgctgaaatcattgctaattgatgaacttcctaaaaggggaaggtgaggcgtcctagaggacccaacaccctaatacacatattaccgagccccacataaaagagtaagctttgaatgaaattactacaaagaaagtatggtggcgaagctaagctttgaaagaaggaaaaaaaatgggggcagagaagatgtccaagagataagaatagaacacctctatcaagaaaagaactgacctacagcaggttctatccctctattgctgttgaaccatttcaggcacccatttttatttgggtgaaattgaaaggtgaaaggaattaagaggaaaaattcattcaacactatatcagactgcaacctttaatgcataaaatatagccacactgtataggttagtatatgcagttcacaccaaaaaaaacctatttacttttgagagtctatgtataagagctcacaaagcctctggctcccagcaaaacaggagaaaaaaaaagaagaaaaaatagggggtcagcagattctttctgttctttcctcgtacaaaatagagttgataaagtaccctatttctaaagtagcagcaacattttctattatttactattttgctttttaaaaaatctgcaattcttattccaaacgtaaaggctccctagacatgtataaaagtacatgcgtataaaactgaaaccactgtaataaaataaaactatagctataatcctagaaggtatagagaacaatacaaacacagccatattctgatgagtcctaccagaagccatagtctgattattctgtcctggttaacaaaacagaataaatgagttttgtcccactgctgcttctctgcatgtagtattaaataataatagctgtcatttattgagtaactaactatattccaggcactttctaagcacattacacacacataccccaggacagaagaatgactatcccattttaccaaagagaaaactgagtaacttgcccaaggtcacaaatccaatacatagtagagttggggtttgatcttgggtctctttgactccaaagtcccctgtctccaataatattaataatggttattactactattagctatggatcaagtccaagccccatagagaaaaacttacatggtattaagagccaaagcttgggcatcagaacacctgaccctgaatcctggcttcaccatttaccatctgtgtcacattgggcaaggcacttatcccttctagaagcccccatttgctcagttgtaaaagcatgtggatttacattgaatttccattccactgaatataaatgcaaactttccaatattcgaatatatcgtgaatagtacaggtatatatattcagccccaacctagcatctaaatctcacttcactgatggttgctaaggtataacttctctctttaaaccagtttttttgtttttttgtttttttttctggaatcattggtgggacagagttaggagagaagcagaaaaatttatcttctgggatattgtaggatggctgagatggtggttaggtgaaagttatttccagaatcctgaactggaaccaagttttattttccctcaaaaaagggtgagagaccatattagatattagctaagttatgagattcatagatgcttattttaggtcaactaaaatcctaatcaccatttacaacatctctctatgaagaaacatcctccaaatttgaaacaaataacttataaacattttgtgatctaatctgttcataaattagttattgctctgctctggcataatagttaataaaaattcaaagctgacagcaatttttggcataagggttatctataagtttctgtccctaagtttttctattaaaaaaatcgttgagttagctagcccaactaacctgggaggctgaggctgcagtgagccgagattgcaccactgcactccagcctgggcaacagagcaagaccctgtctcaaaaaaaaaaaaaaaatctataaaaacaggtacatggagtcatatccttttcaaaaatacaacatctgaataaaatgccatttaaattaaaattcaagattttgctttggcttaaacaacagtgaatttgtagctatagatcaaattccacagcaaaataagtaaactatttgggataccaagacaaagagaaggtccatttttcatatattgtgaattgctgttttcctaaattgactggacgatgtctcaatcttctatactctgattgtgcaaatctagtatggagctgttattctccatgcctattgtaagcctataaaaatgtaagtgcttattttcagaatatttcaagttaattcaatgaattttccatgaattatagtaaaactcataaattgtgatggaaagatattactaggtaatctctgaaattacagtagtagagctggagtttgatcttgggtctctctgactccaaagagatggaagtaacataattacctatgtatgtgagcaaactgtgggtaaaagacaagagctgaggtgaggaaggaaggaatgggtgtgctgggaaaatttctgatcacatccactcttgctactaggacctgggaagagacagaaagtacttaggaaatttaaaaaaaaaattgtggaaaactggagccaaaaatctttatatcgtgggaaacaaaattaattcaaacctggaatgaccatgtcctttacatgagtaaaaagctaactttaacagcaaactgtacccgggaaaaacaaaaccctcatgtaagctaacaattgcaaaaggttatttaataagaatttcctaattatctgtagggagagggtgcataaccaatgtctatccaaaacctaagatggatagcacaagtaaggttttaaagcattcaatacacagaaggaaagaaacagtaagtttcctttctcttcagttgctaaaattaccattaaattaggtctatttcatttaaagaggaggatgctagaataattaatgatgtcctttatgtaaatgagaatactgaaaagcctttcattctcccctgaattataaaggttcaaataagaagatatggaattacaaatgaatttctattcagttgaatatgtatgaaggtaaagtttccaacatcaggatacatagttaagagtactgaaataggatatttaaggagtttataaaaattccccaccctgagtatctttaagaatgactagttctgggttatctagtatgtttaacacatggggtgaactgatgacagacctgtggcaaattgatactccccaagtgaagagaaggcaaatgaggaaattccgatgttgccatgacaatgtgactgatcatgacatcagtgattcctaattccaaactgtaaaaaacactcccagaacgctgacaacatattagatactcccagaaccacccttccttcacctcccaatctaatgtttgatctagtggcaaatacaatgtttcaaacaagtcattattattaagtgttaaaattcagttagactcttttaaactggagaaagtgccagaaggaagaagtagataacttctgaagacatttacatttttgggggctatttacatttttcacatgtaagacataatgaatttataaaaatgttacaatttataaaatgctttattatgcattatctcattaaagtctaggggaaggaggcaggacaggtattcttaccacctgcccctgccccgccaccagtgccgacctttttttgaacaggtagataccctcaggtcgatcaggcaacttgccctctgacatgaagccctagaaatatagaatttcagaggtggaaagaattattaagggccggtccttgtaattgctatacaataatcattatcaataaatctttcagtaattgaatgaatgctactgtctctccttggacacctagaccaataataaattcattccatctattcatatttagccatatctactagaaaactttgttaaacagccttgaaatctgaaaccatccatcatagttctaccgcaggactagaatcggtggcttctatagattgtatagtgctttttctctgtattctgtactggtcaacttataaaagtgagagctaagtcatcttttcttgcgctttaagaatcttataagattgcttaagcagtctgtaaatctctaacaatttaacttaacctaatgtcctgcacatagttatgttttgttgcaggcatgaatggatgaggtaaaagttttcttgcgcgtgcacacacacacacgcatgcacacacacacagaaaggacagaaataattttcaccttcttttcaaaaccatgaatatctgggttaaaaagagttatatatatgtaaaaaatgtagtgatgcagtaatcaaataagaaagaacatgctttataaactacatagtgaatttgcatcctaatctttagattacttaagatcataaagagagactgtaaataagtgttgcattttgcaactgtatgtgacttacttattcagtaaatgagattctatgaccaaatagtttctcttgacttcaaccattaattgtcagaataaatcttctcactttattttttgggtaaaagagaagtatcacactcatctctctgtatcagtgtcctataaatattcagacataaactgtatgtcatgcaatctaagataccactgattgtgagctgcctgaaaattacagagatgttaattgacatttgaaaaaagtggactacagtaattaaaagacaccataacttacaacctgcatttcaactgcagagatgttgaaatgtaaaaaaggtgagtcttagaatctataaagcatggcatacaagtacatgaatacacagcatgcaaatgcatatccatgtcctttctattcataaccttggctttagaaaaatatttgtcaaacactcatttttaatcttcctaagaacacagagctactaagtttttacaagtaaatgactcatatgctcagtttttccaaggagatctgacagtgtgtcttacaagtagtgggcacagtctgcacgcatcagaatgagaaacttcaccctaatctcacaaagacatccatcacaaaggaacaagctgagctgtctgcttccctcctcagctctctctccacaatcacgtcattctacttcaagtgtttttcagtgcatttatataataagaaagatgaaagggagatgaacctaaatctatagatatttatcagactttgccactgtacacttcttgctgttactgctttaaactgtcagttgcaaacataccttgagaacatgaatactggactgttacttctttggcaagttttagtcaaatgcatgcatatacacagacacgcatacactccaaagatcagtcatcagtactgttccggcacacggcatcaattccaactgatgagcctcacaaatttccacccttttacggtacctggagtgccagttcttagtctttctgggtcttcagattggaaaagtaatttttacatagatcaggtaaatcagataaaaagacatatatctgaaatgattatcacagtccttaaaatttatatgaaattacaaagtgaatcaaaagcaataacaacagttaagatgacccagttacaggaaaagatgtaaatgattcacatttggaacaacgactattagtatctgatacttcatatttgttcaggaactgactagttccttgcatttcctcttcttccatatgcagcattccttttagtcatttaactgctggtgtgatgataaaaccaacatgaaaaactgaaacaaaccagccaatttatttattgactgcaggttgattaacctgaggcttggggattatccattaatttcatttatctgtaatgttccccttgttataaaagaaaattataattgatctcaccttgaaagtcatctaataagaattattaacataccaaactactgatatagccaagcctctaacacagggcttggcacatattaagtgtttgaatattggttcatgaatgttggaatgaatgaataagcaatatattaaaaatgtatgcaagtcctattcaaacagatgttattattctataaagttaaaacaagcttatgactttcaaatacttaagaaatacttaagaaggtttgtaaatgagtcactgttatcttgggtgagataattaatcacggttaattcagtgataaattttacattctaatttaccagccaaacttcctcaatattaaagaatatcatgctaaattctgtaatttgtaatttcttgattgatttaaaatatattctattttagggggactcttttaagaagtcttagaattcacttaagctatttgctatgaacattattaaatatatcaggctaaaaaatattgcaaatcactataggaactgttttcctccctttctatgcctgtttggccctttattttaaaaatgaatcataatttaagcttttagtgactgacagattttttaaagtaggtgtataaactctttaaaaaaattttgttttagtcccatgtctactcctaggtgtataaactcttgtagttcaaaatcatatcattcgtttcattctatcatttaacatttaaaaggttatatcagtaaataagaatggacaaagtgctgataattgctgaagtttttctttccaccttattgtatgtttgaaaatgtccgcaattcaagtatttttagtggatgtcagtgtattaaaagacttgtgaggttgattcagaggatcccagacaacaaaagtaaactgattcttggtgctacagcacctaggaagtgactacatagccggttataagttttcttttaaataactactttatctgcccatttaccttttcctcatgaatctctcctaaaaaagaaaatgggaaaaaaaccaaacatttaaaaagttatgagactacagtctggatagtacaaaggttacagtaaacccattgagaaatgctgcaaatctgagtgatgaaacaaataggaggctgctaatttctacatttgacagtgaaaatacacgatttttaaattagcagcttatctgtgattcatactgactctcttctctttctccatatcttttatggagttttctcgagcttgaactgctggaactcttctgtttttccctctgactggtccttatttactccaaattgttgtataccctgcttccaaaataatttttttctggcctctttggctgtatcactctacttcctaaaactcccacatcaaatgcaaatttctgaacagcacttgtaaagctctccactttctaactcccttgtccctttacctctatttccagctactatttgtgtcttggctgcccatgaactcactcttctctagctctgagctttgccaggaaacagcctctgtttttccatcagccaaaccacactcatccctccgtttactctgttgaaatcatgcctcatggtctacccactctgagtttttcctactctcatctattttccaagacctcttgctacattttctaaggatggtattaatgcctaaattaggccagctcagtgtctttacattataaactcctctattgaagatacaatgatggccaagatttagcacatactccccatacgtactctattgaaatgcagcctgcgacagtcagcaagtacccattgacctggcttcactgtcagtcagtagttctcggcctcctttccagtccagctcacctgaggattatgatatattcccctcagtcactgtggctcacttctacatgatcctgagccagaaattatgaggacacatgctcccaactttactgaaaatttttgttacaaagaatgaaccagaacatggttacaggaacccagaaaagataagcattaacctcagtaccccctacaactttctctgctataaaacaagttttgctgtcagatacataaaaattatagcctcttgaggtaagaaggtttggaaatgattcactgttatcttgggtgagcatttatttattaaaacccaagatggtaccacgatgtattttagaatgactaaagcaaccaagaattactttccccggatggcacaacttctgttgaaactccaatggttgaccgttctgtcttccccacaccaagaggcaccgtctcttccttttcctcttcaaggtacagcaggacagctcttgagatccactctaacttattcttttttctttttttttttattattatactttaagttctagggtacatgtgtacaacgtgcaggtttgttacatatatatacctgtgccctgctagtgtgcggcacccattaactcctcatttaacattaggtagatctcctaatgctattccctccccccttcccccaccccacgacaggccccggtgtgtgatgttccccttcctgtatccaagtgttctcattgttcaattcccacctatgagtgagaacatgcggtgtttggttttttgtccttgagatagtttgttgagaatgatggtttccagcttcatccaagtccctacaaaggacatgaactcatccttttttatggctgcatagtattccatggtatatatgtgccacattttctcaatccagtctatcattgatggacatttgggttggttccaagtctttgctattgtgaatagtgtcacaataaacatatgtgtgcatgtgtctttatagcagcatgatttataatcctttgggtatatacccagtaatgggatggctgggtcaaatggtatttctggttctggatccttgaggaatcgccacactgtcttccacaatggttgaactagtttacagtcccaccaacagtgtaaaaatgtttctatttctccacatcctctccagcacctgtggtttcctgactttttaatgagcaccattctaactggtgtgagatggtatctcattgtggttttgatttgcatttctctgatggccagggatgatgagcattttttcatgtgtctgttggctgcataaatgtcttcactctaactcattctatatgctgccatttatagtaatgagtagcgggcaaggaatgggctttcaagaagaactactgtgtcaaaaagacagttctactggctgttagctactttcacctaaatctactgttcagctgtaaaaagcaaaaagacaacaatatcatcctcacagagtttttgtaggaaacaaagcagacatttcagtttgttaaatgacaaagatatttatcatcatttatttaccttcttctaatgcccacctttttcagataaatatagcatatagctaagcactcttcctgggtgatatcatttcatctaaacctaagccttgagtttagggggtcgtgagtaagcctgacagttccacttcaagaaaacctacacatccactttctttcattgactgacatcattgtgtatcatcaagttctgtaattccaattcttccatctattctgtactcttgttcacaaaaattatagcattagacattttaattgtgccagacattgttttaagtattttacaggcattatttcatcaatccccacaccacactattattctcattttcagacctggaaatgtaagtttctccctcattctctttattctcccatcctctagtctatgaggtcaccatcaccaccactagcaccaccagcacccacccctcacagctccccccgccccaccacatttaatttacttaacaaacctaaattccccagtcagctaattcaagtttgttatttctagtgcctggtattcatagccctttcatcctatctttaaaataagcatttttttcaccagatttttctattcctctcctgagttactcacaacctcccaggcaaatcatactatgctaaaaactcaattttagttatacctttactgctgtatagcattcattttactcatttgcaagtggctccctatcccatcccaaggagaattaattccaaaccttttagtttttttctcaaattcctaatcctacccctacaatgataaggtagagatcattcattatttacatgaaattctctcagttatctctcaaatacatatctatacttttgcatctcttcttggcactcttctctatcctagctagatagcttctctgtgttcaagatttaggtttccatttgcatccttgatttcgaatgaacttctctataacataccctcacttgactttccccagcccaacttctataccagtttgattgcttgcttttctttttcttttcttttctttttttctttcaatttttcttggcaacttaatacattttttactataaaagtaatacattaatatattttccttttaaaaatgtgaacagcagatgcaatggcatttttccagtaaactaacttgctcaagtcttctctattctaaaaaaaagcggggtgggggggagggaaatgattcccttgcttcttatgctactttattccttctctctttcgctgctggagttcttgaaagactgtccgtcagtggacgtttgcacttcactgcccattccagatacagaccactataacttggcttctgactcccacttgtccccacacaacatgatgtagttttatgacagcaccagccactcatcttcatggaattccaagttgtctactcttttggggtcctcctttaccatctttttttctctgctctaggttcttttccacgtatgatctcacccacaactaacatttcagtaatcaccagtgaacaaaagaataccacagccagagctccaatcttggctcttctcttgggatctagacccctggttcaaacttccttgaggtcctgtgtcccctggttggccttcgctcctctctctctctgatatcactactgaaactggtgtgccccaccaaggccatttgtattgtactttggttctatctatctgtccatttcactggagggtaaactcgtccagagcatccggtctacctcaatgccttgtacactgttacaactctagaaagaaaagttatttaaaatttattgacttggaagttcaagaaaaaaagtgccatttcttttttttttttttgagacagagtctcactctgtcgcccaggctggagtgcagtggtacaatctcagctcactgtaacctccgccacttgggttcaagtgattctcctgcctcagcctcccaagtagctgggattacaggcgcccgccaccacacgctggctaatttttgtatttttagcagagacaggtttcaccatgttggccaggctggtctcaaactcctgacctcaaatgatccacccgcctcagcctcccaaagtgctggcattacaggcatgagccaccgcacccagccaagtatcatttcataaaattaagaatttaagccagaggtgagagattggggggggggggaaacaaaaagaaagatgtctcatacttattagcactcttactgtctgttttgtctggttttcactcagaaagccttcagaatctgagaagcacgttttctctcatgagtgaaaatactctcaaatgcatttgggactgctggtcatttccaaagtgcaggggaatgaagccccattaactggccacttctggatgttcatgctataaccgggaagctgagcaactgaattttaaactgctgtttgggttcttcttcaacccaacattcagttaaaaactttatatgattaaaaaaatacatatttgggtcttcttatgactactgtctattcactcacaaatgactatatgaatagcagaaattaagaaagattttacagaatgtttataacctttcatgttaaaaaaataaaaggcagcaaagggatgaagaattgagaactctttcttggtatttatttttgtcccctgggcaactaaaaagggggaaaaaatgagcagcaataggaaggtgggggatttaaaaatccttaaaaaaagactgccttaaaaataatcaggaattgatcatctattcacagataaattattaagatgaagatctgaaggattaaaaaaaaaaagtcttcagatccctattagaccttaattttggctcctaaatggaatatggtcaataaaaaatgactgcttcccttcttggagtctgaagttaaattatcatctccattcctgccagtgtggctgcttaaatggggcagtgtgaagtgagagcatttaaaagcactactattttttataaggtagtccagaatctcaagtttaacggtatacacttgttcagtgcctctgtaaataaataatttcttactactattacagtgaatcctttttaacctaaagggagatgattaggtctcttaaatttttcaaaataacatttgtcttccagctggcttttaattaatttatattttcttagctcccttaaaggctaactaaaagaaaacacaaaatgcttacattttataattccctaacaatgttcctcatctattcattcagtcagtgtttacagggagtctaaaaccaccgggtactgtgcatggagaaggaggccttatataaggtagctgaggggccatgagcaagcaatgctggaaggaaggagaagcaatgaggtagaggaatcatcacttggaaagtgaatcacaggacagtgagactcagagagtagaagaatggcagtagacagtaagaagcaaagcagccggactctaacccagctaaacaaagagcaactacagcagaaatggcagaagttcaaggggaaaaattcaaaactcctgctcttgattttgtgccttgaatggaaaactgtcatccaactggtctccatagacccacctaggaggctgctttctcaggttctgttgagatcgggtttcataactaagattcttattcccttatatattcttagaacaattccacctcattacttaacacaaacagtagtgggtctctattactgtgcttgcaatcagaagtatcctgctaaacaagcactaataaaattgtgcaagaaactgcttcttgtaagttagtacttagcaacagcaagtccacttaagaaggaaataatttaatgtcaggcagcaccacctgctcatttaaggcaagttattaaattatttccatgtctttcaaaacacttatattaagaaaaatctgcagtccttgcacttccacgattggcaggcaccatgttcattttatcatcccaattaaagtgttgcctggtgtccaaacgaaagaaaggaagaaagagagagagacagaagaaagaaagaaagaaagaaagaaagaaagaaagaaagaaagaaagaaagaaagaaagaaagaaagaaagaaaagaaagaaggaaggaaggaaggaaggaaggaaggaaggaaggaaaggaaggaaggaaagagggaaggagagagggaaaaaaagaaaagagtcttctcatacacaatctaagctgtctctaattttttaaaaggaatggcaagatacatgctccctctccctcaacaaacataaaaattagattatcctttatcaaatttaaaatgtttttaatgtttatattttagtgtctctgaaagaaactatcatgtgacatacatgagttaattttatttgttgccaattcttataaaaagtggatatagatgttgttaaagtaggttttagagattccattttagtttcaagtgtataccttttaagtcaaaggaggtactttgtttgctattagaagccaacagatttttgacaagatggtcttaaggactgtgttatatttaggaatgagcgcttcctctccagatctgtgccgccacctcattccgggtgacttctaaacaacctagggtcacagtggcctctctttaattagtatctcactgctggagggaggggagcatgtcagggggaaaagaatgtaagaagacattataaacaaaggtcttcaaggcaacttagtggtttggtcaaggaatggaagaaagcctagctccttttttgttaccaaagtaaggccggaaacggttttgattcctacaaattgagatggttggaatttttctgtatgtttgttaattctgccttaacgtgttagactttatctctaatcaatttgatagcctatgactgaaaactccacattcattgtttagatgacaaaataatgatccataaagaaaacagaagattcagtggacacttttccatctaagggatgattccattaaggttttagcaatatccaagttacgttaatacaacattttccttctttaaaataaagaagtataatatttaggaaagtagaggtcaataataactatctaagagatattttttaaatccatcatagctaaaactgtacctcccatatatatacctacaactaattttatgaggccaggaacaaaattctatttaaattgagctcactgcaataaataaatgagtgaataggtaaagagaactgagtcaaaaataaattttacctgaaaatcaagaatgacacaattaaaaaaattgttaaagcctaaatatataaacatatatgtttatctgtatctatatttatgtctatctgatggtatatattaatacatagagatttcatatagatccaattccacaagggaattacatttttaaaatatcaaagactaaaattcttgaaaactaagacggttatctgtatgaataaggaacacttttagaatattaattcttcagttaaaaacactgacactgattaatggtttctgttgggtattatttacaagaaatcatctcagcagggtgcctgtgtccagtttcataatcacatagtacactcaccctacaggattatgttctaggcaagttcgaatgttaagttgaatttcattctcttcaggaagtgacttttactcaagattgaatacagctgttagcacagatcactgttccaaaaacatttctatgagagctggaagaaaacaccattttaagaaatgcaaattcactttcattatttcaaatctgtgcaagcaaagctggaagggaatctctggtctctgtttgttagttaaattaggttattataaatatttaagagaaaacatgcaggatggctacgagatggctataagactttccatgtacttctggagcctacatattttaatcaccagtttgtttataacaaatacagtggcttggtttttgtttcaaaaatcaaagttatactcaatttctccttaaatttcactctctaatacaacttggttttctctctttatattcacagaaatgtagcctggcaaaaaacgtggggtggcctcagcagaggaaatgctgccagctgaaaacaccggatgtaatcgagaccacaagagacacagacttagttataaatgtcgaactaaaaagaggtattggaaagaaacaaagtctaactttttattggctggattaattattgtagtgaaatcttgctatttcatagtttagtcccaaacaaaacagcatgtcggggaattatttttataatcctaggttccactttctagagctttaaaagaagaagaagaagaagaaaaaaactctatggattcttaccatccctggccattttcctactactgtgggtaggagaacagaggttttgggtgtcaacctacgagacagtacaggataggttggatcggcttccacaaatagctgggaaaagagcatttttaaagaatgtcttttagcatcacagaaatgtccttttactatataaagaaccagaataaatctgtctatagatggacccgtaacagactaagttaattagtattattaattctctttggcaatggggtggggataagaaaacttaatttacaaagtctgtaatagctgtttttctattcccgccctttgacattgtgcttccttttgtatggcgtaatggtgataaccatgttccttccctattggctatgaaaatccaaatttgaattcaagacaagcataacactttgggatccctatgatcctcctagtttggctattagtgctttccaagctgcacttttcaacagttatctattgctttctatgtaaagattgtttcaattaaatacatttgtctgttcaaaaaataattcttcaggcaaaaatttaaaatttaatttactttttagccagggaaaatgatattttaattgtcaaaatataatagtttttatttaagaccctgactaaagggagcagttagcagtttttgcactttaaagttaacaggaagtctcctttcttccttttttttcatataatatgatcaatgtttcttggaaaggttaacatttctcataagagattaaaggacccaccataactcacacaggagaaagtgggcatcttctgatggtaagaacaggtcatttttgaaactatgttgttatacatgtcagccatcttattaagtaagctcttggaaaaaataaaagaaaatcttttgccactagagggagttcaaaattccctttgtatcagtaaacacgtaaagtgcatttaacctctgaaacaataaaaactatgattgtagtacactttttaaaaaattaaacaataagactaaatcaagaattaggtttttggggaatatatcttttccttcagttagaatagctatggtgaatatatgccatggttattatgtacagcacacatatgttaaaggtaacttaataattttaatatctggaagcagtacaatgaataagcattcttattcattgggattgtaatcttttactctttcaagctgtatttaataataactgtggtagacatttccagaaatacctgcccacaatccctcccactctgcatgtgctttcccaatgtgattctctcctccaaagtccaggactggaacctgtttcacctctccttgcctaagggatggccctgtgtgacagtagaatgcagaagtatggctgagtgactttcagatctgggcctgaagaggctttcagccaatcaccctgtaaagaaatctgggctagtctgccttccagttagaatccacatggaaagagaggctgtacagaatgagaagctacacagaggagaatggaggcactccagtcaacagccagacaactgtgaggcatgtcaatgaggccatcttggacattcaatccccagctgagctcccaactgcatgcagctgcctgagtgacccagccaaagtcaaatggagcagaagagccacccagctgatcccagccaacccaggaaaatgcaaaattttaagtcatttttaagttttaagtcatttttaagtcattttaagttttaagttggaggtaatttgttactccataatagataattgaaacaataatactagtaaatatgtttgtatcatggtctatattttttaaaagcccttttacatccactatttcctatagccataccatgcagtgggaaactagatcaaaggttaaatatcctggccaagatcttggagtgcttaaaaacaaatacaaagtttaagagagagatgtttctcttaagtaaatgctatatatccctatttttctactttttatcttatgtagtagtgattaacaaataatcaagtattggttaacaactactttctcccgtgcttcttttccataagaactagttaatctaaacaattgtattcatttatttttctattagtcctaccagttcaaaaagtaaaaatagtattttgggacctgtgcctctttatttatgcacacctctagctgtgttttgatgtttgagaaatgttaattatttgaaagttctacacacaaagcactgacagcttcaagtggtaagctgaatttttaaatgtgaaatgacccttaattctttccttgcttattctcattgtagacaagttttacaactctcctatctgcttgactttcagttgcatgaaataatgatggggcgcttagcaccaggtcctttgcattttggttccccatccccctttccctcctccagggttacctgtgatattgtatatgactgatatggacatgacggtcccagcaagagaaagacactggatttttcccactgatagctaagtgttcttgcggggagttgtgtgtggcaggaggaatggtctcagaatccaagaatggcctgggttacctaggcaatagtctaataaaatagtctaataaaattagactattgcctaggtaacccaggccattcttggatttattagtttattctgaaaatctgctagaaatcagattttcagaataaactaagtggtccacattcaagacagaataaaattcaagttttgaaagctttggatccagaccgaatcaacctactagccagattcttttctgaggaagcaagcatcccactatcttttggtacaaaggttctcattacctgcagaagacatgctacttcctcgtttcccacagcagtcacaatgcaaatgagaacaataagtataaatgttaagttatagaggctggaagccaggaatctactgggaggctgttaagataaatgtagattaagcatcttctacttgataccttccaaagtctgtttcataatcttaggctaaagaaccaaatctttcacatggcccacatatctctgcaagacttgactcatacttatttctccagtactatcttgcactattgtcttcctcaccactaagaaccaggtaatctggactttcagttccttatacttgcaaggcaaccaatccagcagtatgtttcacacatgctattctctatgcatggaatgctccttctctacctctttgcctagttaactccaacttattcttcaaggctcggcttaaattacttataccagaaaatcttccctcttaatccccagaataggctgggtcttcctgttatataaccctcatatagcatactgtatatctccttttctggactcacaaagctgcaatctaaattattatttaatgtccatcctttctgcctcattataaaagctctttgagaaacggggttgtgcctgttttgctcattgttttatcaccagtgttttgtatagtacagaataggtattcaatactatttattgaacatgaatctattatatttaaagaatttaaaaatgtatgtctacatataaacttgcatatgttacattatattatatgtacttctgaagatacaaagaagaatctgacagtttcagtaagaaaaagacatgcacaaatgaccaagtggtaaagcagactctgatccagtaatatgaagagaactaaataacataccatggagaacagggaaaaggggattgactctaaatggtgaccataggaagctttgtggaggagaatctgaaagcgcctctaagaacagggaagatttatacatacatttttctggcccactagaaacagcaatgttcacagtgtttgccatcccactaacatttttctgttcttcactcttccttttcacttggtattcccgaatgccttccaaactccaggaaataaaagaaacagtggtttaatgggggcattggcaatgcttaactcaaataaatgacattttgacaataaactattagaactgtgtgaaaaccgatttaactccttgcagcaataatagcttggcaactgtgtaagaactcagattaggaactgcaaatcaattgtccaaaagaagtcttttcttaaatccagatataaggtataaggaatgtaagatgtttgggcggggaaaagggagtaaaggtcacgcaggccacctggtggcaatgtgtcagagaaggagccagagctttgggaaaagtgaggctcactgccaacactgcaggaaatctttgtgacacactggtgtgtcatgaaacaatgattgggtatcactaataacaagcatttcacttaatggtttggaattcggatatactacatagcctgcccaactacccagaacagagcagaattagatctgggaaatcaccctagttgcccaatcctcagggaattctcatcctgttggatccagcaagctgagttacgagctactcttctcttctgaggttcctggcttctagctaactggtcacatctccgggatgagcacctactctcactggttttgatacgaatattaaaaaaaaaaaaaatctttagactgagtgaggtagctcacatctgtggtcccagcactttgggaggccaagacaggtggatcgcttgggctcaagagttcaagaccagcctgagcaacatggtgaaaccctgtctctacaaaaaaatacaaaaactagccaggtgtggtggtgcacacccatagtctcagctactcgggaggctgaggtaggaggatcgcttgagcctggaagttgaggctgcaatgagccgagattgtgccactgcacgttagcctggcccacagtgtgagaccttgtcgccagaaaaaaacaaaacaaaacacaaaaaaactttaaaacaagtttgttcacagttatgagaacttgagttcactgaattcaagttttcagcaacaaaattccatttttagcttcacaattaaaacaagtgaaatttggtccaaataacaaacattaagtgacactgaggtataattttgattcctggatttacatacagtatgtcaatgttaaagtgaaaaataggcttccgttatgaaagacacatttggtaagccacactgcctacataaaattttctgattctgatctgcagaaatgtggcttggctttggagactgttctttttcatatcatgtcttcacagtgctatcttaaagccttttggcaacaattcttcataaagtgaattttaattcccaagtatattttaatatcaatctttcaacacaaagcactataatttcaaagcagtttggaatatctaggaacatgtctgtgcaactgaactgcgcttcctcttaagtatggcattgtgcaatcctcgtttactttggattatgtgataaggactcagctcctaatcattttaatctcacatttttatgacccttttgtttaaagtcaatattttaattggcatatcaagatctgaatggatcttggattagaaattgtgtttaaattgagaaaagggcatatactagtcaaatgacttcgatatgagcacaggagctgaattttcactgtagtaaaggagcttgttataaaataaaacgtttaaaagtaatgaaataacattcaatagaaaaactgtagtcactagttcatgagaagtgtttagctgatacaggattctagtccatttaaaaaacaaataaaaacctctacaactactgctttgggcaatacatatatattaaattcaaaaatattttcaaaatcttactctagccaatagtttcagtccatccaattaccaactatttcatcaacactactaaaaaatagggcatgagtgtgagctccttttccccccacattgctcacccaaaacaaacaaacatgaaagaaagagcctttgagggagacagaaaggaaaaaaaaaaacagcaacgcacaggttagaaagaagtctctaacagtgctatccattagaattttctgtgacgatgaaaatattctacatctgcagtaatacagtggcctctagccacatgcagctaatgggcacttgaaatatggctagcataactaagaaacttaatttttaagtaatttaaatttaaatagagtttgtggctaccctattagacagcacaggcttataattaactaaatccctgaaaaatgaaactattgtttatgatcagttaaatatggcaattatcttgcggccagcaggagtctagaattatttttatctaatggttatctgatgatctttaaaaatcattactaaatcagccatgaaaaagagcttggactacaaataaataaaaggagctttgacttcctggtcaaagatggccagaaatggtaagaatcccagggcagaaaagacaagcccgaccctgagtcctattgttactgttctgccatcttacccagctttctcaggaattagacatttaaagaggactggtattttagccagggcagttcaacatgaccccaactttctacagaataagtagaaccaagcagaaatgaaaagaaagatcttgctaactttctatggaaagagtggggttattttaaactatcactacaccttaactaaataacctactggatatacactctgttgagaccatgagccccttatgggggacatataaatatttaattggggttttatctcttttttattggtataccaacaattttttaatcatacagttattatgccttatgtgtggtcccgaatacttttattcatttaagtttcacaaacactgaggtaggtggagaagaaattattatcctcattttatagattaaaagaaaggcttgaagttaagtgatttgccaaaggtgacccgaacatcagtcctctgattgctattccacatctctttcttcagagtatttaataaaggaacgattatatagtatattttactgtttaatagttggaatgcaataggaatggcagatttttatattgtccaagccttaggcttttctttgtattttggaggaccttttacattagaattccagccttacttttttctgtcaaaaaaggcacttattttcaagatcatctctggctatgagaaaagaaacctatactcctcacataaaaagcaaggaaaagcaagaagttatatgagcaattgaaatagaatgatggaaaatcttgaattattttaggtccagactgtattaatcttctttgcctaaatttcctagcactcaagaatgcattcattatagtatcctaatgacttagagtgtgtaactaaatgtttcatcaatagccaagttattatttaatgagaatggataatttgactggggtatagaggagcaggaggcagttttgataagcattacaggattcatcaagtcacctccatgagtccaagagattatcaataaaggtttcatgattgctacttgacttgaaaaaagttaaagtcacccagtttaactgctacaatggtcccttccaacttaagtaacatatgtaagtaactgtgatagataatctccaatgagccactgtcaactccttcctttctggtactcaccagaaaaagtagaatctacctcgtctctgctcgaatttgggctggcatggtgagtggctttgaccaataatgtgtagtagaggtgatgctgctcctggcagcttattcctctcctcttggaagctgaccaccatgtaaaaagtccaagtatcttgagaccactgacccgtgagaaaggccaagctccccgtgtagagagagaaatgctaacaataaagcaaggggcaccagctattaaaagggaaaccttcctaatattctagcccatccaagctgcctgctgaatgcagcccactgcctcacccagatgatgacatgtggaacagccaactgcccctccaaattcctgagccacagaatcatgagaaataataaatcattacttttttaagccacaaagttttgggttgatatgttttatctattaccttacttgattaccaagcttgctacttctcctttttattctgaattttaaaagtaacttgaaaagtagtaatctctctttctctcattcttaatacaagaactaactttcagctgtccattttcactcaagtttaaatatggctgaacacaaatatttccgagggtgctgctgtcatggaaaaggcccacccagacagaaagctcatccctgaggtttcctgctacattcgtcccattcttattgccaccatctaataaaaataaaattttaaaggagctaacagaataatgggctcctggaaaagcatagcctccattttcacattgtttgaagacaatgtgtttagcaaaagaatctgtagctaaggtctttatacagaaatttgaagggcaatgaagaaaaataaccagacgaacctggggagcatagctagagaagtctacaatgctcaaagggaatactctccaaggtaaaacctactgtatagtgccccattcatttagcttggaccctggaagagcgatgttaaaggaaaaaaagaaaacttatacagaaatagaatagcaaattgacaactactatcccaaaggccgccatcccagaacttcatggttgcccttagggacaccaaacttatctccaccactgccacctgcttcatttttggtctagtttgttgctcccacctgagcccttctaaaggaactcttgagaagggagaagtgcaaagcctagattgttctcatttttcttgaagtccctcccagttttgcacaattagcaagaatagtatataaaccataggaaagtaatatagaatccacaaagcagtctacctaatgcctcactcaatttcaaaaattgccagttctgtcagaaatgtcaacactccaatcaagtattcactacacagaatcttcatctttccatcagtaacagtgaaggagtaacagatgttaaaatatgaccaactttgtgcctgacaaatgaatcttgaaatatccgtagcaatatgaacaaaggcagtatgtgaatacgacacttcgtctggatcgacttcccaagggtttgatggacaatgtctcagaacatttttgcatcttaagaatgtataacatagatgttcaaattctgagggctacagatacaaaggaatggtccatattgcctgtgctaaacacatagctgtcattcaggaaaaatcacaggcactgattatcaagggacctgagttatatgtcacagtttttctaaagtcaagttccaattatcgccatattgatactacctcatttaagggattaatgatacacaagtgaaattctctaaaacagtttctaagagcctgactcttaaaaggcaggagaatcaccttgttcatccacttttactcctgtgatcagggagattagctaagatttttgacaggacctggacaaaaactaagaaatgccttagggtcctcctgttcctaccattgctggaagggaagaagtcactttgatgttgataccctctctaacttctcaagtcctttttcttttcagtagcactgaaagcattcagaagtaaagaatattcttcgagatcattatagcagactccataggggaatcaagttatataaaaagtccattgtttatgcagacgaaaggcaatcttcagaggctcaatactttctttttttttttttttttattgatcattcttgggtgtttctcgcagagggggatttggcagggtcacaggacaatagtggagggaaggtcagcagataaacaagtgaacaaaggtctctggttttcctaggcagaggaccctgcggccttccgcagtgtttgtgtccctgggtacttgagattagggagtggtgatgactcttaacgagcatgctgccttcaagcatctgtttaacaaagcacatcttgcaccgcccttaatccattcaaccctgagtggacacagcacatgtttcagagagcacaggattggggataaggtcaccaatcaacaggatcccaaggcagaagaatttttcttagtacagaacaaaatgaaaagtctcccatgtctacctctttctacacagacatggcaaccatccgatttctcagtcttttccccacctttcccccctttctattccacaaaaccgccattgtcatcatggcccgttctcaatgagctgttgggtatacctcccagacggggtggtggccgggcagaggggctcctcacttcccagtaggcgcggccgggcagaggcgcccctcacctcccggacagggcggctggccggacggggggctgactccccccacctccctcctggacggggcggctggccgggcagaggggctcctcacttcccagtaggggcggccgggcagaggcgcccctcacctcccggacggggcggctggccaggcggggggctgaccccccaatctccctcctggacggggcagctggccgagcagaggggctcctcacttcccagtaggggcggccgggcagaggcacccctcacctgccggatggggcggctggccgggcggggggctgatccccccacctccctcccggacggggcggctggccggacggggggctgacccccccacctccctctcggacgaggtggctgccggacggagacgctcctcacttcccagacggggtggctgctgggcggaagggctcctcacttctcagacagggcggctgccgggcggaagggctcctcacttctcagacggggcggttgccaggcagagggtctcctcacttctcagacggggcggccgggcagagacgcccctcacatcccggacggggcggcagggcagaggtgctccccacatctcagacgatgggcagccgggcagagacgctcctcacttcccagatgtgatggcggccgggaggaggcgctcctcacttcctagatgggatggcggccgggcagagacgctcctcactttccagactgggcagccaggcagaggggctcctcacatcccagacgatgggcggccaggcggagacgctcctcacttcccggacggggtggcggccgggcagaggctgcaatctcggcactttgggaggccaaggcaggctgctgggaggtggaggttgtagcaagccgagatcatgccactgcactccagcctgggcaccactgagcactgagtgaacgagactccgtctgcaatcccagcaccttgggaggccgaggctggcggatcactcgcggttaggagctggagaccagcccggccaacacagcgaaaccccgtctccaccaaaaaaatacgaaaaccagtcaggcgtggcggcgcgcgcctgcaatcgcaggcactcggcaagctgaggcaggagaatcaggcagggaggttgcagtgagccgagatggcagcagtaccgtccagcttcggctcggcatcagagggagaccgtggaaagagagggagagggagaccgtggagaggggagaggggagaggggagaggggagaggggagagggcttttttctttttttccctgagacagagtctctgttgcccaggctagagtgcagtggcgtgatctcggctcactgcaagctctgcctcctgggttctcaatactttcttataattgtgaacataaaggatttatccttctccattaggaagcctgaccacatgaacttcatctcctatctgaggcaggacccaacatccctggcctcaagaaacaatgcacaagaacaattctgacacctaaaacgaatccagcatccctgacttgatgatgcttccacctcagctccaccttcagcatacacttaccaactgatctttcatccatcgtttgactcccaagctgaagaacacctcaaataccccaggaaggatctccatgtaccaccttctccactggatgaggcatgagggtcgccatatttactgctagcaaagcctgtccccatctctcccccaccctcaccaaaatctagtcactctaaaatggcctctccggtgatgtccctagatctgctggcacagaagtggaaatatacagtactttccatttccatttccttagtaggttgttgactcgaggtcactctctgtaacattctttctagggattcttatagcacagacgtatttgtgcacattggaggcagctatcaccttctcccaagaaatctcacttacaacatcttctcacatcctctaggtttccatcttggattattcatcagtgtgtaatcattttagcaggggaaggtagattgttttgctttttaaaaaaattgagatataattaacagaataaaatacatagatcttaagtgttcagttcatgagttttgacaattgtatacagttgtgtaaccaccactgaaaacaagacatgagacattcccttccacgagtgttccctcatgtccctttcctgtcaactccctctccaaccactgtctgatgtctgtcatcatagaggagttttgccagtatctggatttcatgtagatgaaatcacaggataaagtcgtttttttgcaactggcttctttcacttggagtgtttttgagagtcatcaatattgttgcctgaatcagttgcttgttctttttttattgctaagtagtatgacattttaagataatttgtttacccattctcctgttaatggacatttggattgtttccagtttggggctttaaaaataaggctgctaaaacatctttatgtaagtcttttttgtgaacctatgtttttatttcttgttggtaaatacctaagggtggtatttctgggtcataccaggtaaatgtattaaacgtatgtttaacttttaagaggccgggcacagtgactcacacctgtaatctcagcactttgggaggccaaggcaggagcactgcttgaggccaggagttcaagaccaacctggggaacatggcaagactgcatctctataaaaaatttaaaaaattatctgggtatagtggcatgtgcctgtagttgcagctactagggaggctatggcaggaagatctcttgagcccaagatttgaggctgcagtgagctatgctcacaccactgcactccagcctaggcaacagagtgagacgaaaactttataagaaactgctgaacagttctctaacatagttagaccactttacatttccactatgattaagaataccaagtgctatacatcctccctaacagtaggtgttggccgtcttttttatgttatctattctagtgaatgtgaaatggcctcgaattatggctataatttgcattttccctgatatctaatgatgtgaagcacctttttcaaggttactagccattcatatatcttcttttgtgcagtgccttttcaagtatttaattggattgtttgtctttttatggtagatttgtagaaatcctttatgtattccagatccaaatactttgtcagatatatatgctatgaacattttccaagttggaacctgtctattcagtttcttaaagatagtatatgttggtaagcagaaatgtttaattttgataatgtccgatttatcaattttttgtttatgatctgtgctttttatgtcatgtgcaaaaaagctttgcctactctgagatcacaatgacacttccatgtcttcttccagaagatttacagttccaagtttatattcgggtttataactcaattcaaattaaatttttagtatagaaataggtataaaatttcatttttttcccagagagactgcttcttagtactacatttgcccatagtttgggaaatagtagtatccagtgtatttgaaatctaatttaaacaccttagtttacatgtaagttgtacatgcccacgccatgctgattttattttctgctgcattcaacattctagtagaactagccatcccaatactgagaagtattacaaggatagatcatttaaactgcacatcctacagcagctagagactttgcgttatataaatatttcactttgatttttttaaagcaggagctcagatataaaaagactcttaggttctaattttagtgaaagtcttataatttgactcataagtacaactatttagaatgaaatgtttctaagtgtaaaatatccacgacttgttcctgtacttgaaatggaatagagaggcaacaggaggcccaacgcaggcagcagaaggcaggaaggaacaaccgcctgctagaaagggcactaagggaactcatgggcagtttctttctttttttctccttcttgtttctttttaaaccctgcctgccaaattaaaatgaccttgaggctgggcgcggtggctcacgcctgtaatctcagcactttgggaggcagaggcgggtggatcacttgaggtcaggagttcgagactagcctggccaacatggttaaatcccatcttaattaaaaatacaaaaattagccgggtgtggtggcgggcacctgtaatcccaactacttgggaggctgaggcagaagaattgctggaacccaggaggcggaggttgcagtgagccgagattgcgccactgaactccagcctgcgtgacagtgagaccttgtcttaagaaaacaaaaaaaaaaacaaaaaaaaaaaccttgacttacacagaaagagagcacagcccctcctctggacttagaagcagcccagaagaactgaagacagcctcatagtataatgacaatcatgaaagatttgaaaatcagttaagcatgtgctatagtctgaatatttgtccccacccaaatctcatgttgaaatgtgatctccaatgttggcgatgcagcctgatgggaggtgtttggatcgtgggggtggatccctcttgaatagcctgggccatctcctggtgatgagtgagctcttgatctgagttcacaccgagatctggtcatttaaaagtgtgtggcacctccccccacccccactctctctctggttcctgctttcgccatgtgaagtgcctgctctggctttgccttctgtcacgagtcaaagctccctaaggcctccccagaagctaagcagatgccgatgccatgcttcctgtacagtctgcagaactgtgaaccaatcaaacctcttttctgcataaattacccagcctcagatatttctttatagcaatgcaagaatggcctagcacagtgtgctttctgtcacattttaattcaaattccattaacacaagaaatagaatattggtcaatgaattaggccactctactttacttgtagagtttctgtacttgtagtacttgtacttctgtacttctgtacttgcagaaactctacttgtagagtttctggtaagatgtcaactgctctctacttagctttcccagatactaactcaatggggatatctttgaccccaaactctctttaggaagagtccaaagattgctggatttcttgttatgaatgaagtactttgatttccacagtaataaggtctacaacaacattctgttttttattgtacaggtagaaaaccagtgtgtgtgtgtgcgtataagagttaagtgggaaaatggaacaacttctttacaaatattataaaatacattgtataaaataaaacacactctattcccttatatttaagcatctatcaagattcatggagaaatttttcaaagcatactctgaatcctgatgccaaaaatcatttgatatgtaaacataaagtacgtggaaaccacatacataaaatcataaaagtctcagctaaaagcacaaatatctagttacatatttattaataataactaacttttattgagcactttataaatgccatatactgttctgtgtactttgcgtgtcttactcaactcatttattcaacatgataaagctgtgaaattactatcgctattctcagtttacagaaaaccgagaaacaaaaagggcaacttgccccggattacattcaaactcaggcagtctgactccagaacccactgcctttgtgctgtgcactgaactgtgtctcccaaaaatggctatgttgaagaccttactcctactatgactgtatttggagacaggggctgtaggaggtaattaaagttaaatgaggtcaaaaggctggggccctaatcctacaggtctggtggccttacaagaagaggaagagagaggaagagatcccccaaccccagcaccaaacacatatgcactaaggaaggacacatgcgcacacagcaaggagacacccttggcaagccaggaagagccctcactagaacctgaccatgctggcaccccgatcttggactcccatcctccagaactgtgaaaaaacaaatttctgctgtttaaaccacccagtctatggtatcttgttatggcagcccgagcagactaatcaatccactctggaaatttcccttcccagagacttccaaataaggggagaatcagaaagaataaaagatctaatttttactccacctataatttcttctcatactagtacacttgcccccttttaccttttcacagggtactaaaagcaactgagaaactgaaaccttattggattttatcattataaatattcatagatattttttaatattcacatcaatacatgcaggttaagacatgtttactacattgatctttgcaaaagaaacataaaagcttctgatcaatataaatgtaaaagtttctggtcagatttttagcataactagattttcaggcaaagactctgggactaaaatggaataagaatgaagaccttaaatgattgctgttacagtgttcctgatttattaaaaataatcacaaagcattactagcaatgccaaatctctagcattctgatcagtgaaaggaattatcagtgtctaaaaggtctttgtcaactctaacatctataaacatttaagtggtattgagcagattccataatctgatctgcttttaactgtggaaatcaatacagttattaagaagctatttgaataattcatgttgtaagtgaaggccttcagagtagccacaatgtgcttgcatcttaatggtattttaaataaagttgtgtcttgctacaatgcacatttagtaagcaagaccaatccccatccatcagttcagaggcggtgatgagagaaattctgacagtttcagaggaacaactaagctatctggtttttataaataagggagttaagggaaagtttcttctcccagtatctcagaggaagatagtatctgccttttcattcaccccactgccttgttgctgaggtctgacattctcttggagatactgttcagtgatatcactgcaaggcccatctggctatgttaactggattaaatgcatatccatcagctccaaaaaaaaaaaatgtattaagtgtcaagtggttaactccaggtaaagacatctgggcaagaatagttttctttctttgaaagtttttcaaccttatatcattatcataacgtttccctcacattgaaatcagagtttaaataacacctaccttcaaaaagttttacatttcagacaagtatcaaagaatatgagactataagcagaggctccaaaagttacctagtcccagcctcatccaatacttgaaccctgtctatgacagtccctccatgttaagaaccagtctatttgaactcatcctgttcataaactcattgccatcttctccaggattggccgattgctcttcaggcaattatgacaaagctcttccttatgctgagcccatatctgtctccctacacttctacctgtttgttctaactcacccttaggggtcacttagtcaagtaggacacctcttttacttgcgatcctttctgacacttgaaggtagagattatggtctttctttcctcttaggccaaagcgttctcagcatcttcacttttctcatgctctgttcacatccatggacacatcaatatcaatggaagggtctaagatatatacctttggaaaccgtgtatgtgagagaacccagtggacatgtccactatcaaaacttatctctattataagaaattatttctgttttaaactaattaccagataccagctagcaccttttctttgttgtttgtccaccccattttactccccattcctcggactgctgtcccctccggttgacagggctttcctctcccatcccacaaaacgttccacatgcttgccttgacttttctctccattcttgtcatgaatactgccctctactgccgctgcaccctggccacaccagactactgattggcgcctgaaagttccaagctttcttgccacctcatgttgttctccaccaacaccaccttgcaccccttcttcatgtaactaatgcttactccaggcaggcagcctgagaatgcaaagtagaatgtgttaatcagtatagacgaagtacttacgaaataaccttcaaatcttaaggacacagtgaaagtttacttctcatttatattccagttcaatagtccaggggcagggatagtatttctaggtgggcgagtgagctacacatggccatccttcaaggtccgagaatgtggccaccttctacacctgacctccaaggtcatctcagaaagtgaagaaagatcatgaaggcttgtataggagattttatgcccaggccaagatgtagtatatgttccttctgcccacattccacttaccacaactcaatcacaggcctccaaacttactgcaaagaagctaagaaatggagctgcaggaagaaaatgaaacagggttgctaaattcataattctattttgttcttcgtgaaagtctatgcttactgatattactagaactggtatttttaaaatgatacaagaatatacagtattagaaaaggatacttataaaaggataaaagcactgctccactgggtggtgaaattctgcatatttacttgtttctttccccagctgaactgtaagttcctggaggccagcaatgtggccttcatttttatactgctagaatatagtgcaggacattcctgctacaaatgtccatttatagttgagacagcatgaatgagtctttgtctattctttctgcaattcctaactagattgctaaaatggtacttgaaaatccaaagatcaagagatactgcagcatgctcttctgagtgctgggggtcaagagatgctacagtagctcttacacagaattggatgatgcccttgataaccatggggaagatgcagccatctcctttccccaagactctgatctgagtcttactcatcactgaatccttagcactcagcactcttaaaaacggttgaacgaataaatgtaaaacactgaaaaatattgttataaataggctaatcagatcataggctatgttaactttaattttcatgccaaaagtaacaaaatctgataacaggaccagccataaaatgctgtcaaacagtttttactggcttataacaattatctttatatccttttataatattgtctattcttatattctttccataatatcagctctaatatattttagtctaataatttttttagaaagttgtattcatttttaaataaagtgaaatggtagaaatcacctgactacttggggatttgaaaaccattaactccccctccccctccccctccccctctcccgtctccctctttgcacggtctccctctgatgccgagcggaggctggactgtactgccgccatctcggctcactgcaacctccctgcctaattctcctgcctcagcctgcagagtgcctgggattgcaggcgcgcgcagccacgcctgactggtttttgcattttttgatggagacggggtttccccgtgttggccgggctggtctccagctcctgaccgcgagtaatctgcctgcctcggcctcccgaggtgccaggattgcagacagagtctcgctcactcagtgctcgatgttgcccaggctggagtgcagtggcgtgatctcggctcgctacgacctccacctcccagccgcctgccttggcctcccaaagtgccgagattgcagcctctgcccggccgccaacccgtctgggaagtgaggagcgtctctgcctggccgcccatcgtctgggatgtgaggagcccctctgcccagccacccagtctgggaagtgaggagcgcctcttcccggccgccatcctgtctaggaagtgaggagcgtctctgcctggccgcccatcgtctgagatgtggggagcgcctctgccccgccaccccatctgggatgtgaggagtgcctctgcccggtcgccatcccgtctgggaactgaggagtgtctctgcccgaccgccaccctgtctgggaggtgaggagtgtgtctgcccggccaccctgtctgagaagtgaggagcccctccgcccggcagctgccccgtctgggaagtgaggagcccctccgcccggcagccgccccgtctgggaagtgaggagcccctccgcccggcagccgcccccactgggaagtgaggagcgtctccgccgggcagccgcaccgtccaggagggaggtggggggcagcccccgccaggccagccgccccatctgggagggaggtggggggcgcctctgcccagccgccccgtctgggaagtgaggagcccctctgcccggccgccaccccatctgggaggtgtacccaacagctcattgagaatgggccatgatgacgatggcgtttttgtcgaatagaaaagggggaaatgtggggaaaagaaagagagatcagattgttactgtgtctgtgtagaaagaagtagacatgggagactccattttgttctgtactaagaaaaattcttctgccttgggatgctgttaatctataaccttacccccaaccccgtgctctctgaaacatgtgctgtgtccactcagggttaaacggattaagggcggtgcaagatgtgctttgttaaacagatgcttgaaggcagcatgctccttaagagtcatcaccactccctcatctcaagtacccagggacacaaacactgcggaaggccctagggtcctctgcctaggaaaaccagagacccttgttcccatgtttatctgctgacctcccctccactattgtcctgtgaccctgccaaatccccctctctgagaaacacccaagaacgatcaataaatactaaaaaaaaattaaaaaatgggggatgaatggaaagaatacctgccctgcttggtgctaaatgtggctctccccttcaccaaagctcatttctcattttcagctctatacatctccaacctgatgaggccacaggactccctgctgccctcagtatgacttacaaacaagccccacctcaagcccaccctccttcttttgcagattcctttctcaccccctccactctgcagcatacacccttcaccctgctgaccacaccaaccataccagcacttgctgccatcctgaatgacaactgccacctgctgtataccaggcacagaggaaacactctttttgtggaatctacgaggggtgctaagcactctatgggaatcacttcatgcaatcttcacagtgctgtacgcaggtactaaccttgcacccattggccaggtgctgtggctcacacctgtaatcccagcatttgggaggcagaggtgggtggatcacctgaggtcaggaattcaagaccagcttgaccaacatggtgaaaccccatctctactaaatacaaaaaattagccgggcgtgatgaaaggtgcctgtaatcccagctacttgggaggctgaggcaggaaaatcgcttgaacccagagggcggaggctgcagtgagccaagattgcaccattgcactccaggctgggcaacaaaagtgaaattccatctcaaaaaaaataaaaaataaaaaatgaaaaaaaaaaaaaaacaaaaaacattaacccagtttgtaatagtggtggtttgttttgtagatgtagatagaatgccttcttcctttggattaaatcattacaagctgagatatcatcattaggaaactgtaaaagcaggaaatgctgtcttccttttccagtctataattaaacaggaagataaagatacagactgaagtagctcccaagccaatattttgaaacttgtgttgacctgacttaaataccttacttaatactgtgactgatttttattaagaaaaacaacaacaacaacaaactcaagtatctaaaactagaaaaaggacaggtgcagtggctcacgtctgtaatcccagcactttgggaggccaaggcaggaggatcacttgaggcgagggcaacatagtgagaccccatctctacaaaaaactataaaaatcagtcagatatagtgctgcatgcctgttgtcccagctagttgggaggctgaagtgggaggatcccttgagcccaggagtttgaggctgcagtgagctgtgatgagcaccactgtattccagcctgggtgacagagcaagaccatgcttcagaaaaaaaaaaataaataaataaaaactagagaaaatatcataacatgtttattgtcttgatgttttgtattaattgtcaaagaaacactcaggatctctaaatttatctgcttgtgttaaaccaatgtttgctctttgggtgttggttgttttgttcaaaatatccgtgattaaccctgatgagtgttcaccttccagtgccttcatagtttttatctcctttgataaatgaaataaagaagcaacaggtacaaaactaatccaaaaaaagtatttcctttacaatgtacaagtataatctatatttggattaaaatgtaaacatcaataatttatcattttggtagtaaaataaccttagtgtgttattagtaattttcaaatctacttaaacccaatgcaccagacaaaatatagaaataaaacgtttaatgcagcactgtttttattattattattattatttttttgacagagtcttgctctgtcagtcaggctggagtgcagtggtgcaatctcggctcactgcaacctccatctcctgggctcaagcaattctcctgcctcagccacccgagtagctgggattacaggtgtgcgccaccactcccggctaaattttgtatttttagtacagatggtgttttcaccatgttggccaggctggtcttgaactcctgacctcaggtaatctaccctcctcggcctcctaaagtgttgggattacaggcatgaggcaccgcgcctggccaatgcagcagtatcttaaaaaatcatccttttattatttccatctaagttttttttcaaattataaaatcttatatttaggttttatctatctaatgaaaaccaaataaaacctgaataaaagcaaacttgaaccccttaaagaggctgtacaaagaatttaagtatcaatcatggcaggactagagtccttgtcatctggatctccatggggatgtgatctagtttgaggcctagaaaatcagatcagttatgagaaggctctatggaattactggaacttagaggagatggaaaaaaaaagatacagattgatatggaggcctctgagctcccaggaaatcccaaagtcctcatctaaaggtcccagggctatcatggtgagctaataagtacagtcattcctcatccatgggagatgggttccaggacccccagaagacaccaaaatccccagatgcttaagttccttatataaaatgacaaagtatttgcatataacctagggacatccccctgtatatttaaatgatctcttaattacttatattaataacacataatacaacataaatgctatgtaaatagtggttatactatattttttgttgttgtattgttattcattgtttatttttaaaaatattttcaatctgtggttgttcaatccatggatgcagaacctgcagatatggaaggccaactgtattctcttccaaggtgtgcacttttacaggtcagtgcaacaggcttagaatgaccttattacgagaatggtaatcaacagtgtcaagtgcttgtaccacgtaatcacaaagctaagcactggagggtatagcagagaacaagacagacgtactacctgctctcacagggcttacagtccagcagagaaaactggcattcatcaaacaagtacgagtatgataaaagtctcccaggagaaattaggagcttatgagatcacattacagggactccagacttggtgagggaagtgataagttgtgatatttacatttgctcaagtcacttaaccttgtaatgccttagtatcttcatctgtaggatggggtaatagtagtgcttaccttacaggactcacgtaaggattaacaaagcactaaccacagggacaagcactggataggtgattgttgtgtgtttctgtaactactgttatgatgatgatgatgatgatgatgatgcttattattactattactattggcctgaataaggaataaaagtttgccaggcaaaagggagagaagggaatagcaggaggaactagtccagagagaaaaaaaaaaatatgtgcaaaaccctggagatccaaaaggttgtggtgcttccagatggacaaaattaaggcctgtaaaaaagaaataaactagagatctctaaaagggaggatccttctggatcctttccaaaagtttcccctgtcatccttaccatcgtaaaagcatttccccttgactctgcttttctttccacataccatattatgatcgttcttttcttttttataattttctgcattttccaaattatccctgtaagcatgcattactttcataatttaaaaaaagaattttaaaagtgatcccttcattctttctctccccataacaacctaacttctgccaaatttgacttgtattcattgccctcttatgtcacttccccctcactcaacaatgcattgccaccactccagcatcatgtttctcaaacacagatctgctctctcattcccatgcttcaaacatttcatggcctacaaaataacacccaagctcctcaggaaaatcacccaaatgacccagaacctacatccagtctatctttctcgtgtcatctcctaccactcttctccttacccacccttcttcacaagcaccctcagccacacagaacttctcaccaatttcctgaatccagtatatactttggtgcccctctaccttagttcatgatagtttttatgctaagagtggctttccagccttctccagctaacaaaattcactcctccttcccaacccactaagtttcaatgtcatctcctctatgaacgtttcttctattctctccacctcacccccaaacacaagcccttgtaatgacctctatgtttatctcctgcttatactgagttctatcaaagtagaagccatatctactttacctttgttgctacatccagatcatatctcaataaatgtctgtgttgttactgttcaaattaagataatcatataatggtttctttgaggaaacctcatgagaggtagactgtttaaactagacatagaaaggatgcaaggacaacacaccatttcaattatttactcttttcatgcaatgttacatgagtatttaccaagttagcacacagttactgactgcttactatttgtgctaggtacacagttgtgaataagatgctaaagatactaaagaaacacacaaataaatgcatagttataaaatgcagtaggtgccatataaagaaagaacaggagaccatgaaggatggcaactttgaggtcctggggtaccaggaagtgcctctctaaggaagcaactggaacaatgcaaagtgaaagtggaggaggaattaaccatgtaaagaatgtgagaaagagtgtcccaaaagaaggggaatatactgggaggtcctgaggcaggaaggatctgggcgtgtgtaaggaagtgaaggccagcatgcctggaacccagtgaagaagaggagtggcgagccaacctagaactcctctaaggagctggtcctgtgaaagagtctgcactttcttgtaaaggcaccagtaagtcactaagggttttaggtagtgggggtggggctgggacagtgacaggatcagattaatgtttttcaaatatcaccatgaaatgagcaattgaaatttcttttaggtagaattactagtgagatggaaaagttctccatttatttgatttttcagtatacttagtataataattatttgaacatccatcagtaaacattatattcagtcaaatatttgtctctgatcattcttaaaagttaaattcaaaccacctctgtagctgtctctctttctctgaatcgtatacttcaggtacacaaagttacaatgcagatcctggttcctagaatgccacattatacatgccattaaatgtttaatcagaactatcattccaaaaagtttaaagcctcttttcaagaaaaagaccggtatctgatgtcaattgaaactcaattttttcatttttacttcagttgaaaacctggccttttctacctgagctgatgctttataaatggcaatataagacatggtacaggctgttatttttgtttgtttagaaatgtcacactcctctctgttgcgaacaaatgtgctcaagttacaattatgtcagaaaaagtagataccatgcagtatcattttttagaatgtgcttgtgacattttgttaaaccaagagaaatgttacaactagaaagggtgagaagaaagaagaagataaatataattgcagactgaacaaaaatgaacaggaacacacttgcacacttcagtttattaactgtggctggcaagcagtcatgctgcatggatactatttactgcttgggaggaaaattgtgaacctgcctggagaggacaccaaaggaatatccaagccaaggaaagaaagagaagggagagaaaattataaccatcacatacaatgtaatataaactccattcccaagcttttttttttttttttttgagacggagtctcgctctgtcgcccaggctggagtgcagtggcgcgatctcggctcactgcaagctccgcctcccgggttcacgccattctcctgcctcagcctcccgagtagctgggactacaggcgcccgctaccacgcccggctaattttttgtatttttagtagagacggggtttcaccgtgttagccaggatggtctcgatctcctgacctcgtgatccgcccgcctcggcctcccaaagtgctgggattacaggcgtgagccaccgcgcccggcccattcccaagctttttatgggcagtgatttatccatgataaaagcaatatttggaaaatcagtgaaagaaaaagaaatacagatcaaacaggggagcagagagcaaggacctacaggcaatgtgaaaagagtggaactaataatttcaggaaaaaacaaacaaacttaaaaaggtaaaatagtagttgtaacattgataataccaccaccaataatagaacctaatgtatttagcacacactacatgttaggtactgtgctaagtgctttctatggtttgtctgatttaaacctcttaccagctatagggtgagtcgtctttttctttccactggaaagatgaggaaattgctgttcaatccaatgtcaggaagctaaaaggtgtacgtgaagtcatctggcacttttgcaaaggaattctagggaagtttttttattatttttaatctagataattaaggcttaaataaaatacagtatagattgttaccttactccttctaatggaaagttttctaagccatattgtaaattttccttctcttctaaacacaataccttgagcataatttaaagttcccttaataattcacagtagactgagcataatttaaacattagctatcatgctctactgtaaaacagcctccaagctgctaagatatgtaaggatgatttgttccttcaccacatggaagctgaatgctctcctgagctgttcctatttcttatattttgactgtctgttccctcactgccaagtgatccactctccagcagcaatgtgacctccccttcttccaatttggcttcttctccagcctccccttgagccacccactgccggctgaattccaatcagttcaattcaatacatttttcacaaagtctactttgacctgtacttgttctctgtgggctattttatcaacagtgatagtagagatagtgtgccaaatcaaacaaacaacaacaaaaaacctggcacttcttttctaataaacttcagctagccagatatgagggactttgtatatcttattagaggctgaaaagattgacaggcctgtgaattagcagtagtatcctcattttattttatttattatttattatgtttattttatttttatttatttaattaatttatttatttatttatttttgagatggagtcttgctctgtcgcccaggctggagtgcagtggtgcgatctcagttcactgcaacctccccctcctgggttcaagtgattatcctgcctcaggctcccgagtagctggaattacgggaatgcaccaccacgcccagctaattttgtatttttagtagagacagggtttctccatgttggtcaggctggtctctaactcccgacctcaggtgatctgcctgcctcagcctcccaaagtgctgggattacaggcgtgagccaccgcgcggtatcctcattttgaaaggagtaaactgaggctctcacagctggtaagtagcagagctgagatttgaacatggtctttctgattcatgtttcactgccataaatggtgtgggagaaaggaaacacaaccatttcttgcagaactaatggcttcaagaaatagctacaatttgctttatgtatttgctgtatggcaagtattggataatattacagattcatattgaaatgataccaccatgaaagatgatcttacaatttgataaggattcagagcacagaccagagattgctaaataggcaacatacaatatgtgatcagctggggagggctgcctatgcactaacaggtgccagcttgaaagtcgcactttcacacatcgtgtgactttctcggtgatttcctggcattctcgggtgcagctcactacttttgaggcagattattgcgtgagggcaaaacaaatatgcaaaaaataaaggtttctctgactcatttttaaaatttatttttggggttattggtttgtttgttgttgttgttgttgttgttgttgttgttttgagacagtgtctcactgtgtcaccctggccgagtggtgtgatcattgctcactgcagcctcaacctcctgggcaaaagtgatcctcccaccccagcctcctgagtagctgggtccacaggtccttgccagcacacccagctaatatttttatttttcatagagatagaatctcactttgttgcccaggctggtcttgaactcctggcctcaagtgatcctcctgtctgggcttcccaaagtgccgggattacaggcaccagccatggcatctggcctaaaactgtcaatatctaaaaaaacagatccagaaacttgccacggaaactattttcaatgtcaaattacatttgaaagcattttcttcccaattcactcatatttaaagttacttaaatctttacacaggatagagaggtcttcacatggcaaccacactccacaaaacttcctcagatctgtagtaaaaattgttggtcacatcttggtttcctggatgtcagaaaacactaactaaaagaaattgccaggccgggcacggtggctcacacctgtaatcccagcactttgggaggccaaggcgggtggatcacctggggtcaggggcttgaaaccagcctgggcaacatggtaaaatcccatgtctactaatgatacaaaaatgaactgggcgtggtggcgcatgccaataatcgcagttactccagaggctgaggcaggagaatcacttgaactcgggaggcagaagttgcagtgagccgagatcgtgccattgcactccagcttgggtaacaggaacaaactctgtctcaaaaaaaaaaaaaaaatctccaaagtaactttttaaacatgaaggccaataatgtaaactatatgcacagttatggagaaatggcttactggatggggcgggcccttacactgcattcactttagatgcacacagcccttatgtgctgctttgacttttctgtagccacaaatcagaagtgctcaagcaaaaatcgcatgagctcaaatagttccttagttcaggcagcaccttgaggatactgttttggagaaaagacctaatacccatcatacagtctaatcattttttgtgatgcaattgttttgagattgtttgggttagggtcggtctctatttatgttccaaataatcccgttaatagatggttttcattcatgtaaattcatgctttatttgtctcatttctagcactggcatatttattcctacttcccataagtatctactatttagagaaaacactgggtggcttcccgagtacgtgacatttaatttcatgttagaaaaataaacaggacaccacacaaagtactatcattctttctgcttctaagatttacatttaaaatgcttttacttgatcctccatgatctttttaatagcgcaaattcttaaaagattaaatatattttggggaaacttttaaatccttaattcttaacagcatatttcaaataactgaaagtgatacacatgttaatcttttaaaatttcaagcagaagtataaaccaacataagcattgtgtttctgacctatttaaaaaacgttttcctctttctcctccacatttatcattattaactgttgaccaaaatcatgtattatttcacatgttacatggttaatcttattgcctccagtgaccaggaggtattttatgaccaaagttctcaataaataatttactccacttttccattacttagaaagtaatgtttcacaatagggcctgacactaatactccaagcatagccactgatttactaaatagatgatctaaggtctaatgcacctatcttctttctaagagatcagttcatcaatattgattgaaaccaatgtgcacaaaagtatatattaggaacacaggaacttcctctaaacaccacttaacttcaagcctaagcctgctgagccaggggaggatttatgacttttcctacaccagcatcattaattggggaaaattcttaattacaatctaacacacaattcaatccattaaccttgtagataagttaaaactaacctctgggcccacagaaggcagatgctccctgaagcaggtgatggctccactcctcccccagtggttgtccttacccaaagcaaggcaatcaaggtgaatgccctgattctggtcataactttgaagaggcatctgctttttgctttttgtggggaatagggagttgagggcattcaatgactctgaaaggcaccaagtcagaggaacaggaggagaagcaggtggtgagcagcctgggtgccttcaccactcagcatgtcaccatgaggtaagggaatcaacacatatcacacacacacctcaatccaggggctttgcagatgacaatatatttaatcctggcaacagctctgcaaagtcagcatcgtttccccagttttgcagataaggacactgtggttcagagagactagcagtctcacgtaaggtcacgcaggacaactgtgatatgaccacaggtcagtggggtgtgaccacaggttatcagctagctagttaccaggggaagggagtcctggctctgccactacacaacagtgcctgcttccttttctaacacaggccattggacaacctgttgcttttccgcaatttcctctctggctgttttgcttctttttaatgatgcccttgagtcaacttattctgatttcactaatatatcttattctgatttcactgatatatcttattctggtttcactaatataaccatattgaatggcgaggtagaagaaaggatgtgtgttttctccccagtccctaagctctgtgagaaacatccgtgccctcaacctcccttttcctatgatcttgtaagacatacagcatcctcttgtcatctccgtccttcatctagtctacaataataagagttaaatgagcaataaaacttaatattatccctcctagaaaaggtgttcttgctgggtaaggtggctcacgcctgtaatcccaatactttgggaggccaaggctggaggatcacttaaagccggtagtttgagaccagtctgggcacacagcaagaccccatctcttaaaaaaattatccaggtatggtgttgcatgcctgtggtcccagcaacaaagggactgaggtggaaggatcacttgagctcaggagttcaaggctgcagtgagctatgattgatccaatgcacttcagcctgggcaacagagcaagactccatctcgaaagaaagagagagagagagagagggagagaaagaaagagagaaagagaaaagaaagaaagaaagaaaaaatatgctcttttgaaaaaatcaataataattctctgatgaaaagaataaggagaaaatggtggcatttcaagcatctgagtgagaggcagggtggccgtggccttgcctgaagttcttcactttaattccagtaagtggagggacaggaatgacttcctgtccctttcatttcatttttgtaaagtcagcgcaacagtcactgagggcaagagcctgcaccttcatcacctctggaaggaaagctgcggttggctggtccagcttcgggagcgctataggccaagcatgtgtgcaggcctgcaaaggctgcagaagataccccagctgggctcacacccatcactgccactcaccgctgccttcctctttgcgttataacctccactttcactgctctgtactccatttggctcacacaagtatttgcctacagctaacaattcagaaattcttcacaaatacacatttccagtagaaaataataggagatcatagcaaggagagagagtttcgttgcccttggacttgctggttattttcttttaggcattagccattgaagtggccatttgcttcgttgtaaaacaatccctcaggcttgcagactgtcgagtagaatcattattgccatcttcttgatttaataatttcaatcaatattcagttttctatgataatggaaggcaagtggcagagcagatagccctgaacaacagacagcacaagagttattactattgttttcagctagtggatgcctcacaggctcttcaccaatttcctttccaagttctcctttgcttagctcaacgggccccaaacttggatgtgcatcagattcaccagggcgagggtattcaagtgacctgacaacctgttgccttgtgagaaaaaccaatctgttttgtgctatttatcacaaataactggcaagtggacactcaagcatttgaccatgcttagtataaggacacaatgcctgccctctgctctgtcttatgccttttgcccaagatttctaggtagcagccctgagcaggcctttaatgttaacatatgacaccagtcaaattagggcagaaaaggaaggaggtgaagaaagaagaaaaggtgctattttgttgaaaaagcacagtgagtggtatctgggtggaagactttaaacctaggcggtttttgagattctagtactgggtaagtagaaataatactctgaacaagaagaatatttggcaagaggaatagaaactttaagcaaaagatatggaacatcatattagccatagtcatttctttcttttttttgagatggagtttcactcttgtcacccaggcaggagtgcaatagcgcaatctcggctcactgcaacctctgcctctcgggttcaagcgattctcctgcctcagcctcccgagtagctgggcacccccatgcccagctaatttttgtatttttagcagagatggggttttaccatgttggccagctggtctcgaactcctgacctcaggtgatccacccgcctcggtcccccaaagtgctgggattacaggcgtgagccacagcacctggccagccaaaatcatttctaaacttagatagacatttcagttaaagaatgaaaccccaaaaagaatggaagagatgggaagttagaaggcagtctaacatttgttatttacagtatacatgaaaggaaaatcatagcaaggaaatgggctcttcctgcagaactgagaagaaaatggaacccgctgtcaagagaagaaagaaaaaaaaaatgttatccataaaattagccagatgctttttcttacccttctgacaaaaccaggtttcatttctgccaaaagtagttttcacataaaagaaatgataacctgttctagaaaaaagaggttcaaaaagatgttcagagtggtcaggatggttaatccaataactgtgaaagctgattcttactcacttaagctattaaatccagaacctttcagtagatatctactttcattttataacatgcctctcaaaaaacatcaattcaggctgatacaagactaagtatttagggctgaaaatgataatgatgtagtcttttcaaccaggattgtaatcaggagggtgagccaccggccctttcagaatgagacgcacttcagtgagttcaacagcaactttgcggccgggcgcggtggctcaggcctataatcccagcactttgggagttgcgaggcaggtggatcatctgaggtcaggagttcgagaccagcctggctaacatggtgaaaccccatctctactaaaaatacagaaattagccgggcatggtggcaggtgcctataatcccaactactcaggaggctgaggcaggagaatcgcttgaacccaggaggcagaggttgcagtgagctgagattgcaccattgcacaccagcctgggtgacaagagtgaaactccgtctcaaaaaaacaaaacagcagctttgatggagagcaacaaaggcaatttaactttatgtctcctatttcattccatggctgttctcttttttcattcacaagtgttttgtttattatgtggtctgtctttctctatggttatgaaaaggaatttgaattttgtgaaattaaatgcagttaagccacctacgatgaacttaaaaaaacacacatacacaaaacactattttactaactaaatgccaaagccttttaaaagaagtatggagcaaagtgctctcctatatgccagtggaaggataaatcaagacatccccttcaggaaacacacaccatgccacaccacgactccccactccacttgcagacacatgtctcagagaatttaccacacatgcatacagagatccacacagggatgggcaccatgacatatctgtaactggaaaaaccagcaacagcttacatcatcaaaaagtaaacagttcagcaaattatgatataattaaaaaacagaaaactactatgcaacaaaatgaataaaataagacatttctcaaaaacaatgctgcatgaagaaaactgcggaaggatacatagattgtgacatcataaatgtagatttaaaaacataaaatacagttgtacgtattttttattaacatacaaaaatgtaggaaaagtgtgcatattaagagtagacttgaaattcatggtgagaggtgcctctgaggaagaaaggcaggcaatattttcttttattaaaaagaaaaaaggaggtaaagcatatggtcaatattgtaatctgttaacactatcaggtggttatattggtatcttttatattgtcctcagcagctttttgaatattaagttactttttaaatattgtgtaactttcactattttccatttaaaagtcacacattttcttgagttcattcaattgcccatttacttatgcatttgacaaatatctattgaacatgtcattaatcctaggatgtgaagagttaagaaaatattcttgcccttgcaagaaccacatgaaatggactaattcttatttaagaatcctgtcatattctgtaagtaggtttctgtacaccataaggaaggatttccactaggtttgatattgtccaagaataattgcaatgtgcttatttacagaatagtatgctactgtagttccataaataaaatggtcaatatttatctttatcttcttgtcaagagtttttattaaagggcatctaagcaaatgaatcttgaggatgttccaaagtgagttatcatcaaataatcaccatgacaaaaagtcaaataagctaatctttctttgaaggttttccaaagagacagattaattggccaacctgtcaccattaatgacaaaagcatgtgatgtggtgtaacttgtatttggcatagtcattatgattgtacttccaacatcttatgacgcaattctctagaaattcaagattaagtgtttggttcatcctatctctaaggtagccaccaatagtctttgcataacaaatatcaacaactatactgaacaaaaaaatcaaacagtactcgatattgttggctaactctaacattgctcctgcccaactcaatcctacattttttattcagattttttgtttgataaaagaagcaccgcttttttggtcatcacatgtcagccctcaggctttcaggctacctaagtatctcttactctcagagaagtactctagatcttactcaggtaagaaaaggtcagacactaaccaggttacaaccaatctcaggagtaaggaaccccagcattgaatcattaaagcaggcctggcacaggaaccaagccggaggactgtggggcagaatcttctcttctctctagggccttctcctgagtgttctcaacagttaccaaagctcagagcagagctcatcagattacgaaactgattcagatcatctaagcctatgcttgggtctgatcaagaaacaggcaacaaaactccaggtacaaaggggctttggcagagctacaccctccccacaccacacacacacacacacacatacacacacacacacacacacacactctcacatttctagaatttcaatctttacatagtagttaagaatgtcatctaacttccacacagcctccctgtcatgataattctaacacttatcagaaaagtgtttattattttaaaatgtatctatgtatgactatcatatggaatatacacacaaagtgttttaagtgttttattgtacttttattgcaatttattaccatctcaagtgagttacattatgtctgccaatcatacctataaaaaccaaagctcctaaaatcattgttttatgacattaaatgtattcaataaattatatggtactgatatattctagagattctatattctgccaatcatgcctataaaaaccaaagctcctaaaatcattcttttatggcattaaatgtattcaataaattatacggtactgatatattctagagattcctctgaatataacaaaatataaatataaaatattgtttgctttcaattgatgctttgccaaactctagttaaagaggaaaaaaccctctaaattagacatccatgtgaaaatgagacaccaagcagatgtcaggctaattttaagatttttaaatttgagaattggaacagtgaagtcctcagcttttgtttttatctgaaatactcatttctcaaatgttaacacagtaacagaaagccaacatgtacacaacacacacaaaaacaaaaacagaacaaaattaaagcccaaatctcaagttccagaacccacacctatgatgccatcgtttgctgtatctgcttttagttgacttctttacagttttgatctttattgtggataagtaacttaagtgaacctaaaaggagataaagaaaaacaaaaacaaaaagctaagtgaagctctgcttcaagggaagcagtgaggtggagtgaaaacagtgactttgaagtgtgacggaggtttcaaatcctggctcaactccttacctgccatatgaccttgggcagttgcttcacctctgtgaaccccagcctcctcttatgtaaaatgggatgataataattatttgctacagttgttgataaaataatttcttaaagtgcctgacaatagtaggcaataaataaataaatgttaactaattgtcttctccttgtctcttttcccaaacaagatgcgaattatccagggagagagcattaggaaagtgagcaacactatggaaggagagaaatgcatagaatgttacccagtgaagactataagtcaggaggacattctagtctgcacatgataacaaaaagatgggcgttcctgcagatcatatgggggtaaaaagaaaaaaaaaaaaaggtgggcacggaccaactgctgtgaggaatgcaaaatgaacgcagctgaccagtaagtgtacaaggtgaaagcctagccacaaaggagaagaaagttcatttagtgagagccaaggagaagaaccaggatttctgattaaacaccacttggattcctagtcttatcgcctgagtgccatctctaagtgaaccttatgcacagcaaggaacagtgacgaaagaaactacagccaagtttgtttcccaaacgtcagagaggtttagcagaaataacactgtgaagacatggtcatctagacttactcataattttcaatgtatgagagcaccacaaccatcttccatacaaaataagctttttggtcccactggcagtcaacaaggcaaaacctgtctgggctttcaaatgtcatggatcagctggatatatagcaacataaacaagttttcatcaggtctaaaatgccatcaacagtaggatacaccattagtctatgtaccactaataaattttttaaatgttccaaaatgaagagtctgacagaagactgctacagaaaactgagacaccaaagggtcacattttctagggaagggctaacaagaaataaacttgccatgctgaaagaaacagcaagtagacatgtatatctcaagcttgggaccagctgaagaaaaaaaaaaatctctgagaatgcaaactgccaactggtactgcatccacacaaccagtgtggtacaagaaaacctcaagcaggtaatttaatatcaagcagtctcagattggtagtgtccctgaatggctatcacaagcaaacacaaatctcctctgaagagcttgactctaatccaggctgatgacccactgaaacatgccatcaaatgtaagacacaccccaacttcagggatgttaaagaatggggaggaaaggtgtgcattagaattaaagaaatgtagtagccattttcctaaaagaataaggtgatattatatatatgggtctgggtcactcaacaaatatttattagtgggtatccactacatgagtaacaaaggtttcaaagaaattgaaggcacgacccctgctcacaagtggctcattaacaatatctctgagaacatggattcatgtttctatctgatttagttttggactgtttgccaacatggttatggcacagttacaaaatggttagacaggtaaatgcaccctgctccaatcttgagtaggcgtttttactgcctagcattggaagtttatctatgaaaagtcagccttaatataagtaaacttattttcattccttcaatttcaacaaaaaacatacaatctattttctgattactttgattagctttcactcaaactaatagtattatgtacagtatgtgggacaggtaaatttgatcatttggttaaaatgtatagattaagtagatattattaacttctatttggggcaggaaagtttgaggtaacttcatcttgaaggcttttaaaaaatctacaatgtaagacatcattaaagtaatttgtatccattaattcaactttgaaaagtgaacatatattttggtcaagagagattcaaactcttgcatgaaaggaagtatcaggggttagctaaatcatggctcacagaaaatattatttgttagcattagttttgcctttacccatggatagggctacctgtgttagaattattatatatacatatgccaaaacccagccccagaggacccttcaacacagtctctaatgccatttcttgggaaatgttctgttaccatcatctaaaagaatacaggtttcccctccaaagacagagccacttggattcatgcctttgtacttttcttggaataccctcatccctgatttgggtcctggtaactgtttacaagaaaacacaaagagaatcttaggaaataaactacatacaaattagacatatcataggtgccctttcaaattccacatggtctggctcatctttacacattaaatcattctttcattgcacttgcaatctcttttctgagtttaccctcgttttcaaccttaactcaaaccagcgtcctgtcctctttgtcagagaggcaggacaggacccagagcttcccgcctggggctgtttctcatctctttggttcttgttgccacccagccctgactccaggcttccctggagtccgcccacacaaggtgtctgcaactcggggctgcagggccttgagagcttccaaccattctctaaatgtgttgtttctttagtgggttctaatttcttctcagttggctaacactctgcaagaatcactatccaacgctttctagtttcccatcttggtacccacctctccacagacccttttcttcagggagtcactaccctcagcatttctacccagaccttctgtttcctctcaggactttattggtattctgtaactaactctcaaacaagcgtatcaacgcagaaatgattctggggaagtacccaaagagctgtcatgagataacatagaattacagggcagactcattctggaatgtaagttggaaagaggttaacagatttcaaaaagctgaaataaaataaaggagacgaaaagttgacctcgtaatgaatagacacaacagtgaaaatcagggaggggctagaaatttctgaaaggaggaatgataaagaagattcttaataaaaaatgtctggcctgtactggcaacatctgaagccttatgctggtaactaggatttcattgagtatggtactccagagccaagacagtaaaactgcacagatatatttttaaacccatgaggctgttgtgtgggtgtagatgtaaaagaaaaacaaatgcaagctggtgttctgcttggaacagctccacatcacactccccaatattattctataaacccaatttatttttacttcctagcgtatgttaattatctgtattatagagtttttcgattgtcagtagaaaacaacaacattatttacttctcacagtacacaggtattttcctgattatatgaaaaagtataacatttataaattaaatttattctatttatcaaccacatcaatttgttgtcctcttcctttttcctattacttactctaacataaaatatgttcatacttatctatgttttatattttaacaatagtgatttgcatacatataaattttctagaacagtgcccatcacatggtaaatatttaaaaatgttacctgtaatcactatcattactatcgttattgttaataacaatgttccttattatagtaaattctatcatagtctatacctgccaggaaattcctacagctatgcaagatggatgttgcctcatccatagaacattttttatctttcctggacagaaattaggtctatttctctagtttttctgcagatctctctcctgataccatccgtggccctcatcttagattgttaatgtctgtttactatattctatttcctgtatcagactgtactgtactcgctctcagagtggggggggtatgaccaacctatgaatcccccatatgcctagttaagaatatctgtgcaatgaatgttataatgtaagaaaatgtaacaggaaaccaacatggtgtaattcttgccttcagttccaagaatggtctctctcggacccatgtctttttatttcaacatttttatacagtattagaaagcatctgtccacaataaaatctccaaatctgcatatagcaccctaccctttcattgcactgacatactgagctgatggggataagctgtgggaaaagtgggacagaaaagtgacagatgatcttcaatatccataagcaagacttagcccactaaaccaccagttctaactggaaccatttgggagttattttggacagtttctgaaaggcaggagcccaatatgaaccaaaactcaaaagggcaataaatgctgggcagggaaataaaaactatttattggaaataaaactgaaaacataatgcttctatgtacaaaattcaagtgcgtgtaaattggtcactctaggaggttgtaatgattgccctttgaaaacaatgaaatgcagaattactaaaatgattcaaggaatacagacatttctatgtaagtatacatattaaaactaggagtctctaatctagaaaaatattaatttaaaggagatattttaagtttataaagtcataactaaatttattcatcaacttatggaaaaattaggaatagaggaaaatgtttgaaatacatatttttggggagagagaagcatattacaaatatgtgtgaatcacaatgctgggttgtttaaagaatatctggagcaactggttgatctctcgcaactcacaacttgtactccaagaaactccctccctcatttccaaaagtagagacaaaatcatgtttgggaaatcctttggtgtatatatatatatatatatatatataacctttcatacattctgattataagtagaagtccactaggtattagaagaagtgaagaggatttatactctaagagaaagtaaaggacaaaaagttgtttgtattaagggctctaaactacaagtttcaggccagggttagagggaggcaaacatttcatttctcattgaaaaattacattttaggaactgttttgatattttgaggtacactagcactcaatcattcaagtatcctgctgtaaatctatttatcgggctgacagttatttatgttttgctaaataacaggtaaacttgtatgaagcagttaaatcctctctctagaaacatgcttaacaaatttccaaatttcagacaacagactagaaaacagaagcaaaaacagctggcgtcactggcttcagtgacctaaattgagcccaaatcttcctcctcgttttgagtcaggcatttttgtgtcagttgacataactatattttattctggtgttgatgtaaactatttctcagaattacaaagccaaacatttctgggaaacaggcagagaaagaaaacttcaataaaaacccaatacctacattaaaaatatatatatttgtatttctgagtgatagaactataaatcaatctcttaaatatttctattttcctcaaaaaaaattgcttcagttgtgtgtcattcccttttactgttgctaacaacaccgaaggataaaacattctggccgagctataactataaaattagcctaactaactttaacaaaatatgatgtgaacttaaaagttagcttgtgttttgtttcattttaatcgataatattgttgcctctttgcatgtgctattttttgaaaatgtctgaaagaggaaatcaggaaatgcattttgtattaatttctagtgttattttcaaacaaataaaattcactttgtaattaaatacaatctcccttttttatacaagcttaaataaaagtccaaataaggtgagtgcttaagctcagttgcaaacaatataagtattgcattctttgacagtcacagaaataattctcattcagtgatccttttattattgctatctttagtttccatgggggtttatgtgaataaaataaaataaaatcccacacgtactcagatagaattacaaatgaatgttctctattcctgtttatgttaagagttccaagaatgactatcatgagtacacataatggtgctcttttagcagtgctgacataaaagggccactcaactatgttgtttaattgtatatattccaatgctaggcaactctccaaaccttattgtaaacattgtataaggtctgtaagtttggcagaataatggagctcaggcttttacagttaacgctaagtgacagttgacttctctttaggattgtatacattgtttgccttgattagtgcagattgctctgtcacgtaaaacaagctggcatttggaaactcagcctaatgttgcgctctaaggttgtcactttttccccatgcacactgacttggtgcagtgttttgtttccaggtctatagaaaaaagtaatctattacagattcttgtgttaaggctagaaatagaatagaataggaatattcaatcaactgctgtattgaacatgtattaagtacacaggtattatgtagcaacagagagattttgttaatttcatggaatttgtcatttaaaagtatttttaggcaaaattcatgtttttatatactcttgaagcagaccctaatttctgtgctatgattaaggaggaaggaaaggcagagaaacataggataaaaggtagtacattcctacccttgagttttataagaatgaggctcatttactgttcaaaggacattgtttatacattccagacttccatcttataattgctctaggatttgtaaaaaggaaatctcagcagggcagcaaaatttattcaaagcaatagctgcacataattggtataaaataccagaacagtctgctctgaaaactctttttctcagcaacgcagatttccaccccctcaactctctttccatatgcaaataaagtttgactacttctcctctattacttgagtcttttcttcctctactcagataatctattttttaaaggtcctataaatattttcaataccttttatatgaaaaacttttttgatgcccatttggttttagtagtgtttacctggttactatgacaacaggtaagaagaactcatgttgtagaggaaagctagttttatctttatattttcataaaacattatgagttaattatgtgttttatcatacataaaggttaaaaacttctctgctgtgttattaccatctcaagaactcaattaaatgaacaaaggaacataagtttgagtctggatattattattcaaatttgaaaaatatattaaaaaaaaggtgagtcacaaagtgtggcatatcccatacattacaaccacgagtctagagtgttagctggacttctgacaaaattccttcagaggtaaaataaaaagaaacaaaataacagcatcttcctgtttaaagggacatgttcattctaaaagttatttccaacaagttcttttttgtgtgtgttgatgaacaagcgtacaatagctttgctaatttaataccactttaaaacatcacttgataggatttgggcagattttctttactgatatgactgcaagatcatgggattttgcggttgttctttttgaaagagaaaaacatctccgtgaaaccagaaacaccacctctcaataggaaggattaaaaaacattcttcagtcgtgatggttgcctaataatgtgaacgtattcaacgccactgaattgtacacaaaaaatggttaaaatgacaaatttaacattatttaccacaataaacaaaacaaaacttcttgagtacgtatgtacaggaagagtcatttcaaacatttgtcataatcaaacttagagcttgttccttttaaaatgcaaaatctctgatataattcttatgacctattaaagacagattaaataaagcataatgtggaaaaggtaggcaaaaagtaggcttgagtagtgtaagaataaccagaaaacaaatatccattaactcaatgtcctgcaaagtattttcagttgcgtcgcaagtaatatatcgtatttatggtgtgataatctttcacattcttgttgaataattatgagattcaagtgattgtttttttcaggttatggacttaagataatgcagatttctgaagacagcctaaaaaatcccactaataactaattttcttagaaagtttccattattgttttgcaatagacctgtaaaaatgctatggtaggcactcactactgcttatctaattcatttgagtaatcacagcagatttttaaaaaggcaatgggtagccatgttaactgaaagaaatgaaactatccattaagaaaagtagtaagcagccattcctttattcaacaaaatttactgattcccacacttcattcgcctctccaccttttcccctctatcctgtgacctgggggccgaccacaggccctgcatcactggtatcctcctctctcgggcttcctattggttccaattggaggcactggcagatctaagggtaggaggaaagtgagacataactggtccacatgggcttagtccttggctgaaggtcatcacctctctcagggagcccccagcactgggcttcccctccaggttctggtaactgctcccaccctttgctctttcagactttgagtagtaaaagcactcgtattttgctggcctcagaaaatgtcgttgtctcttttaggtttccctaagacctgccaacacatttgtaaacattccttaaataccaagtttgcgtatgtatgtcatgcattgcctatcagaatcctaactaatataatcacatattcttgtcagacacagttttaggtccttagaaaccctgagcaaatcctgagaaatattgtttttagatatgtagccatttattttgctttttaaaatttaattgcttttcaattaataatgccccatccatatgttattttttaaattatactaatagagtagaatgggccccccatttttttttttttttgagaagggttctcactccatcacccaggctggaatgcagttgtgtgatcttggctcactgcaaccttcgccccccgagctctgtcaatcctcccgcctcagcctgtcatgtagctggaactacaggaacaagccaccacatccagttaatttttgtatttttttgtagagatggggttttgccatgttgcacaggctggtctcaaactcctggactcaagtgatccacccacctcggcctcccaaagtgccgggattacaggcatgagccaccacacctgtccaccgcctcccttttctatacacattatattcatgatatttaacttaagatagtcattgaatacttggttttttgcattttatgaagtgtttatgtgacaacgacaaactaacttggtagtgattgcctttggggacactatgagcaagtctcatagtaaagcttgagattgagaatattacttaggtaatttaggctaaaagctcatttttatcctaatcacgtatgtatttgaagcagaagcatttcatcactaaagaattctgtctgtgcctcatattcctctttatcatgttggtaaacaaaaaatatggattcaattcaataaacacttaccaagtacctactatgtgcaaaacattgtaataggcacaaaactgaacaaaacacacttctttttttttttttttttttttgagacagagtctcgctctgtcgcccaggctggagtgcagtggcgggatctcggctcactgcaagctccgcctcccgggttcacgccattctcctgcctcagcctcccaagtagctgggactacaggcgcccgccactacgcccggctaattttttgtattttcagtagagacggggtttcaccgttttagccgggatggtctcgatctcctgacctcgtgatccgcccgcctcggcctcccaaagtgctgggattacaggcgtgagccaccgcgcccggcccaaaacacacttcttgtctttaaggatcttatgttcttgtaaaggaagcctgcatgtacacaaattactgtttataaagtacgatataaaactatttctaaatacacatgcaacctcatgctatgccttttctttcctgatattttgtgactttctcagtctttttcccctagcattaaatgttatacagcatagtctaaatgaaatgtcacttaatgcaagttaaaatataagaagaagcaaaaatcaaattagtaagcagtctccattttttaagcaacgaaagaatgaaactttacaggcggcctaagagtgacaaacaaccaacacagaattgcatgtatctagcagggcgtggtggcgcatgcctgtggtctcagctacttcggaggccgatacaggagaatcacttgagcccaggaggttgaggatgcaatgagctgtgtttgcaccactgcattccagcctgggctacagagcgagactctgtttcaacaacaacaacaaaaaaaaattaattaaaaaaattttatatacttgcttcagtttgcctgcatttttcttccctaagggacagagtctcactctgtcacccaggctgcagtgcagtgccacaatcctagctcactagccttaaactcctgggctcaatggatcctcctgcgttagcctccaagtagctgtgaccacaaatgtatgccaccatgcctggctttttttttttaatttgcctgcagattcttagagaacgtgggtaaactgtgctaaaagcttcctaatacattaagaaagtttgatgaaaggtactaaaaccagaaacttttattttaggaagtaaacttgtatcaacaagaaaattccctgtatttccagggataataattcctcatctgcttatttgaccctcactttccttttagactttatatctttccgattgaatgtatacatttttaactcagaaaaataatccacatgacttttaaggtgttcatcatgcccatctttcaccattgaaaattaaacaagtaaaggaagtccaagtacaaagctaccgctatgttttcggagagatttgaaacaatctatttacacatgaatattattaacatcaaaaaatgttttggctcagcatgttgtttaagatgattctctcagttccaaccaatcttctagtcctagcgggccaattgctctaccaaaaaggcactgcatgctgtctacaaaggcatgtctctccccattcttaaaacacacttcctcactggagacctccttgactatgacacttgtcaaataataatggtacacatacaacttaggtttccttacagatagcacgattttaaattgtccacggtcctttccttctgtgtatcccaacacttcgagaattcaccagttatggtcacacacacttatgggaagaaaagttttgaaccaaccacggtgaaggacgcttaaaacagtgagaaataaacaaaaacaaacaaacaaagctagctacaattgtaccttgcttttactcaatcatacaatcctaagaagttgggtgaaaatcaaatgtaataaaacaaactcatccttttcaaaagacttaggaaattgcacaaaccatttctcctaatatctaattaatctttagtatgccatggttcctgatagctttagtttaaattatactttctatcaaagagttagtgacctgtaatcatctttgaaatatgtaaatgaactaaggtggcatttttactggtaaatcttttgtaaattgtggaaaaatcattctctcttatttgctcaatatatcccaatttctcctgtatttgattttcctaatgcatggcacacagccagttgtgacattttcagctggtggacttaatgagtatatgatccaaacagcacgagggaaaagctgtgcccaaaggcacaacgggcttgttgatgccacctactgtgcattttgtttttccaaggttatccacataattgactaaaacagagctcctgaagcctaattgtatgatgattcctgaaggctgcccacctgccaagtgtattcagatagcgcagggaaaaaaacagagaccggtgtggagtgcttggcattaggaaggtggttcccatcagcgtggtgaacgaaagggttggcttcaacagagagaggtggtgtttaatcagagcctcactgggttgttgttgttgttgaccaaactaattacaacaggtagtgatggcaggatagagaaactttaccaagaatgaagtagagtccatccagccgatctgggaaaattccaggcatgctgaaaaagtgaagagggttttggccccacagccataacaacaaaaatctttaggaatgtggcaaagaaagacttcagaaacacaacaaggccatgaataggccaggggccatggagggtgagcagggcgcagctctgggctacccagctcatctacaacaggttagacacatgagagcaaggcagaatcagctctggatgctgctgttctgccaaaccatgagaagcagctatgctagctgtagaaagcacaaaagtctggccggccctgactgccaggtgacctcagacagagtgaccattactgattcctgttcagacaccagctggtgccactggccccattcgcatcccatccaacctgtgatcagtttcctggagtgatgctgaagctcctgtgtggtctctcttctccctttttcctctgcaggccatggattgaccagtcctgtgaggttatgcccagaccctccccagctctggcccttctgccacttcccctctctctgcctccctagagctctgcttctgtctctacactctgggtagcctttctcatctgtaaaatgagtggcttagactagatgatcttaaagttccttcccattctaacattctgtgattcttggatgttataaattcccagaatcataaaatttagagttgaaggaacttcagaagtcatctattcaacctcctactcaacctaggctaacctagccagaattaatacgctttgaaggttctatgtagttgtttttggctagctgaatatggcaataatcaaagcttaaaactttcaatataaagcatgaaaaaaatacatatatatataagatttttgaaacatttaagaaaagatttgaaggaactgaagcccattgagcagcatgttttattgcttagaagttggtatctaagcagcaattcccaatctttgctttcacaatatcaggggcatattaaaaaatcataagggatgtcagaaaatcctccaaaaaaaactaattttcaatttattattatgtttataaacatataaggcagggtgatggggtgtcacaacaacatcaaataaacaaagccatcaaataaacaaagagaataaagagtataaaggggaaatacagttatattttgacatgcatgcaagaaaaattaaaaagaacgtcatctgttcttaaagagtaggtttcagtggcaagctccttttcaaaattaattttgatctgtgataacaaacatactctctctcttcaaaagaattattttcttcatagaacctatgccaactaccataatacagatcttgaagaaatcattggatgtatttaagaaacaagtacttaaaacaataacttttgtgttttattattaattacttaaaggggtaaattcataaataaataagagatataccatccttaaagtttggaagattcattagtgttaatatatcaattctcccccaattgatgtatagatttagtatgattccagtaaaaatcctagcagatttatttttatggaaattgacaagccgatgctaaaatttataaggaaatgcaaagaacctagaatagttaagaccactttggagaatacgcacttactatattgctacagtaattagtattgacacaaggatacatatgaaacagagcaagaatccactgggaggccgaggtgacggatcacctggggccaggagttcaagaccagcctggccaacataccgaaaccccatctctactaaaaatacaaaaaaattacccaggcatggtagcaaacacccataatctcagctactcaagaggctgaggcatgagaattgcctgaacctgggaggcagaggttgcagtgagcctagatcacgccactgcactccagcctaggcaacagagtgagactgccttaaaaaaaaaaaaaaaaaaaagcaggagtccagaagaagaaccacacaaacatgttcacctagtttacaacaaaggcaacaatgaaattcaaagaaggaaatgtcttttcaataaattgggctggatcattaacagccatactggggcaccgggggtgggcgaggtggaacaaacaacaataacaaatcttgatgctatccacaccaaacacaaacattaattggaaattgattgcaggcctaaatgtgaaagataaaacacagcttctagtaggaaatgtaaaaaaaaaaaagaaaaaaattcacaatcttaaagtaagcagatttcttaaacagacacgaaaagcaattatcataaaagattggtaaattttacttcattaaaattaagaacttatatttattaaaactatcaatcagagagtaaaaaggaaaactgaaaattaagggaagatattttcatacatatgtgtgatgaaggattgtatccaaaatatattttaaaacctacaaaccaataaaaaagacaacccaatttaaaaagtgaacaaaaagttgaattgcatggtatgtaaattatatcccaataaagttgttatttttaaaaaatgatcaaaaaatttgcaaaagacttctcaaaagaggatatctaattggccaatgaatatatttttaaaagtgctcaacatcactaatcatcaggaaaatgcaaattaaaaccacaatgagatatccactcaccagaagggctaaaactaaaagactgacaatatcaagttttagtgaggacatagagcaattagatttctcatgccttgctggcaggagaaaactggtagtgtctacccaagctgaacatacacatatcctatgacctacaaattcctctcttaggagtaagtgcatatgttgaacacatgatatgaacaagacaattacagtaattgtattcaaaatagtcttaaattgaaataatccaaatgctcattaataatataatggatacataaattttgatacaatatatcctgtaatccaatacacatagcattaaaaaaagaaccaactgcacacataacaacatcaatgactcaaaccaaaataataaggagctaaggaggccagacagaaaaggatacatacaatatggtttcatctttatgatgtacaagaatggatacaaccaaccaacaaagatagaagtcacactagtagttacctttagtgggtacaagtgaggatgctgtctggttctggaaatgttatatcatcacctgagtggttattacatgagtatatcaacctacagatttaaaatttgtgcactatataagttttaaataaacaaataaaattattccactgcactttgtgatgatgcacactatgttttaattacatatcacaccttccagggcctaataccatgcctggacagtaagtatttactgaatttaattaaactgaccaggtatttccatttgtatcaacttaactagatgatttttagaataatatgtctgatttgctaatagaagaactatggctgtgcacttcctgaagactcctttaaaattcccagtgcattcacttatatttaaaatatctggcttctttttccccaaaaaagggagctaggaggatttgcatactgaaaaacaaacaaaaatgacccatttgcaggatttaacaagattcaaatcaaagaagcaaaggaagaggaaacaaagaaaggtgctgttgtggcgccctagaaagcagatgctcattagggctcaggcacagattactatcacaatgtacttatctcaacatgctatcgtcagaccacacagtcaaatcaaattttgaaggctcaaaggatgtgtactgaagaacatcctgtactgctgaaacatgtatttgaattttgtgacagagacagagagaggtagaaaagaacaccagatatcacccactgtcattttaaatcctatttgtaggttaaaaaataatctctcttaaaaaaaaaaaaaagcaaacaaaatcaaggttaaagatttcttctgctaaacttaaagtctgataaacaattaccaaataagaaacacatctttttttaggtttttgccaattgaaaaaacacaacttttttgtgattattttttaggtaaagaataattagtattcaaaaagtagaaaaaatggttataagtaattttcaattttagtatgggttaagaaaaaaatgtaaactgcttgctatttgactttatcacatttaagtttcaatctcattaggagtatacatttatcataaaaatacttcctattatgctaattaagtacttttgttcaaagtattacatcatgtctatggttccatagcacacttatacgttaccaaataaaattttatttaaaatttccatataaaattggataaagaatcagaagagaaaacccaaatcaggggcaattgttagcaaatacttaatcataatctacagcattaagaggtagtaaagattttttagccaaattttgtcagacccacttggtccctgattccggcagatggagtgggagtagcttatacgatggtcacactggtgcatctaccactatcacacacacctgttagtggacagaagtcagtccagagtggcttaactctaagagtacaagaagcaaattggagaacaggagtgaagaagagagaaagtaaacacactttgaaactgttcagacccttgctggataggggtatggacctcatgccacccaagcccactctgcaggacactggcttttgtgcagctcttcatcacagagtctgttgagctacaacccagaaaaaaaacatgaagggatctctggtctgtctgattcatcctcttaagcatagatttgttcagtatttgtcttccttccaggataaaattcttttttttttttttttttaagagacggtgtctcactatgttgcccaggctggtctggaactcttggcttcaagcaatcctcccccatcggcctcccaaagtgttggaattataggcatagccactgctccccaccctgggtaagattcttaacctgtgctccacaggctgattctaggtaaacatttgaggctaataaaaatgtacgccataggccggcgcggtggctcatgcctgtaatcccagcactttgggaggccgaggcgggcagattacgaggtcagcagatcgagaccatcctggctaacacggtgaaaccccgcctctactaaaaatccaaaaaattagccggacgtggtggcgggcgcctgtagtcccagctactcgggatgctgaggcaggagaatggcgtgaacccgggaggcggagcttgcagtgagccgagatcgcgccactgcactccagcctgggcgacagagcgagcgagactccgtcacaacaacaacaacaacaaaaaaatgtacgccatcatcggattctcaaggaggtctagggtctggggattccctaaaaagttacgaagcattggccgggcgcggtggctcacgcctgtaatcccagcactttgggaggcccggggcgggcggatcacgaggtcaggagatcgagaccatcctggctaacatggtgaaaccccgcctctactgaaaatacaaaaaattagccgggcatggtggcgggcgcctgtagtcccagctactcaggaggctgaggcaggagaatggcgtgaacccgggaggcggagcttgcagtaagctgagattgtgccactgcaccccagcctgggcgacagagcaagactccgtctcaaaaaaaaaaaaaaatttacgaagcatcaacgaaccaggaaaaggtaaaaagagaattggaagagatagacagaatttttactttgtctttttgtttccttctggttgccagcctcaagagatgtttgcttgattcagggctgaaggagagtaaagaaaagctgtgaggctgtagtaatctagtagtggtaagctcagcatgagaagcagtactaggaaccctcggctcttaaaaggaaaagattttattttaattagggggaaaagggaacgagtttatctctgaggccagcacaagaaaacaggtgagtgggtctagaagtgaagagggctctcaggggacccccagaggaagctccagcacaaactccctgatccctgtgacttcacaagctgcacctcccatcttcttgaaacccctcccctgccataaaagggcaaagccttgttgaaagattgtagaagaaccctgtcttcccactcacccaaagaaagcaaagacgagttcctggaaatctaactctgaaaactcacccctctctccaagaaacatctgatgtggtgatttggttcaatggcagtgttagtagagaactatacgtgaattataaagtgggttacttttacagactcttacaggttcgctggggaccatatcattaaggataactatttatttatgaaatgaatttcaagttttaaataaccaaatgacaagcgaactgtttggaataaaattgttggaaatgcaactcacttataagttaaggtatacccaatttttgaacaaatcacatagagcatgagaaaaacatcatctagtagccagttctctgataggtaattctttctgtgtttattgttttttaaatagaagtatacaaatgatcatatggaatgaaacctaaaaagaggctgagattaggcacctttttaaaagaatgtcattttagaaacaatgaaattaatcagagctgtactttgtaggaggcaaagagagtcgtgggagtatttcagctagtgacttgaaaatacatttttctggcaaatttttctttttataaatgtctgcatttgtcaaaaacctgttggatgatgaaacgaaattgttgttgagaagacaaaggtaaagttgacgatattacaaatatcaatataatttacttttcctaatgactaaatattttatctgagaccttattatataaactgtgaaagtatttcattgtaattctactggtaagggagggtttaggggttctccaattcaaatatactcccaattgcaactcaaaatcatcatgtttaaaaagtatttaacaggggaaatagtatagtattatttgaggataatataaatgtaagctcataatataaaattctgttttcgcaatttgattccctgtcctccaccccccacccccagtccaagaaactcaagttcggagcatggcattctatgatgtatccatccaattctgccattctaagtattcagtttttcaacttgtagaagaaacacctctagtattgtgtgaaatgggtctgggaagatgatgcatttttccttcaggaccagtgaaaatatttatgacatctatgaaatgatctcattttgttgcacaaaacctttccctgaaatcactgtttatctgggacccagcagcccaactgcatagcgcatgttgttcaatgggcagcctgaggaatggattccagggcccatattgaggccaagtagaggacaacaggactcctgaagcacttggatccagttgcagaggtgaatatcttattttgaaagaattaaagctggctgatgaccagataaagagatatccactaaagatcaggaataattttttaacatcttattttctgaagaaatgccagcccacattagacacattataaatgtgtagattgcaggcaagcaatgatctaattagcagcattacaaaccccaaacttatttcctcccctttgccggaagcaaagctaatcagttaggagaaataaacatcattccaaatggctcaaaacaatcaaagttatatttctgtataaccactatgccatcatttaaggagtacatttccaacctgccacacctctaataggttggcttaacagcacatttgtaagcataaaactagaaaaataatagggtgaaataaattaattgaatatgaaactttaaggagaagttaacataaagtacaaaaaaattattcgtttaaaattctaagtactcttaaaagaatttatacagcagaaaaaatgcaaaacaatgctggtaagtaaaaaaattcatttattcatttaaagccttatgtctttctaaaattcccagatttattgtagcttttattagcacttttcactttcttgcaaaagacatggcaaagtgtttaatcctacatatatcttagtgccttctcagtcactaaaacccaggacatcagctggtgtgctgctttcgtgggtgcactactttgtaaatattctgtgcttatttcttgccttgtgtctattctgtcctccctggtagcttgtgaggtgctggagagcaggtaccagatattcaactctttaaactttcccaatgtcaagtgcaaagaatgatgtactggggtcactcagtaaatacaattgattggctagtgttttagtccttcatcatgagcctcagcaattttacaacaactaccagcttaaatctttacctaatccaaaacacagatattatagtgaatgtaggaaatcacccaccaacattgatttagcatgtttacagtgccagatctacatgcaagctaactgttcatatcagcatccaacctcacttttagaatctaggttttcatattcaatgtccaacatattctcaatcttctaaaatgcatccatttaagaattagttaagagacaacatggggagagaataacaatgcttaattttatacacttttctcccctaggaggttcagatgttgattttttctctctcctttttgtttttctctcatcattttgacatgcttattttccagggcttgtttgaaaaattaaaatattcacataattttgttaaggagactagatgcattgaggaattagattatgggagatatatgttcagtttgtggttggcttagctgttaccatcctctctacactcttctattgacctcatatctaccagactaagaaatgctttgtttctattatcaaatttgcatatgtactcaaatttgtgtgtgtgtgttcaacacacaccatttgttctaaaattacattttgctctgtatcacctaaccaaactacctatggtagacctccatcgtcccattgctgcctctcatgaggcacagctgagttccatcaggtttcattatttattcattaaaataaaacagcagaggctgggcgcagtggctcatgcctgtaatcccagcactttgaaaggaggctgaggcggcggatcacgaggtccggagttcaagaccagcctggccaacgtagtgaaaccccgtctctactgaaaatacaaaaattagggaggaattgtggcacgcgcctgtagtcctagctacttgggaggctgtggcaggagaattgcttgaacctgggaggcagaggttgtagtgagccgagatcgtgccaccacactccagcctgggcaacagagcaagactccatctcaaaaataaataaataaaacagcagaggaaacagaacatttaaattcatcccacataaaatccccaagccgatgttcaacttttgaatatttggtttggttttataccaaatgttatggtgctgcatttgaacaactgacaggtcattactacatttctttaaaataagctattttagattgcataaaacacttccacttgagagtaacttgacatactcctatttctataatattctattatttctataatattccaataaataggataaaactttactgtctcaatttaaaagctagatgccgaaatggtttcaataaactattaaaaatacaaagtcagagcaatatattagtaaaaattcttttcttgaatgtatattacatggaaattccccacatttgaatttaaactcaaagccaagattgcctaagatgtaaggtgtatgtagttatactgatactaaatgactgaatactttcctagctcacctatcttttccttttcccttcaaggaacttaagatttggctcccaacataggggaaaaaacaaaaagttgtatgggaaattcaaaagaaatagctgttggaagagaagggtgctacactgttgcattgtaatgcatcttcattttaatagttacatgtccttcagcctttcaataccacttccagatagtcatacataataccccactcacttaaggaaataaggttgattcatcagtgtaaaatactgcattaccaaactgacatattttaagcaaactttatttacatcataaatgtggttacttcttatgacacaaagcgccccatgtctgaatattatgcctgtgtacttccacttcattagatgcaacagttttatgtatcaaatcaggactactaatttctggagaaacagattgatacaatattcatttggctagaagtaagtaagagttaaggaattcaataaaaaatgcatgcaaaagttcaatgcagaaaaactgctttgttctactagcctttattaatagaataaattatatcatttattattttcagattctgaagctaggttcagatatattctgtgtcataagcgtatgtaaaaatggcgtaaaaacaaaattgttttgttttagaaagaaacgtatctttcgtatagacatttcttcagcatggaaaacaatacttcttcatacacaaaaacttaaaaaaatcaagctttccattaattttatagaaatatattcttagaactatgtgaataaagattacaactgtcccaaattgctttcagttggtacaaaatatgtagctaactaatcatggaaagaaaattttgtacttccctttcttcaaaagaaacagaatatttcaatccccataactatttacatacatgcactggcaataatgtatgttgtagtatctttgaaataaacagaccataattcaagggttgcttttacaataagtgaaattaatgcagccactggttgaaaatgtgtacatacaaatctttaagttaaaatatgttagattatcaacatcttttttctgtgtagctaaaagatggatattaaatttaatataatacagcataggtcattttaaaattgagaaaattatttaggacaatatgtggttatgtttataaagctacatcaagctacatttcagaatgaatgtgtcagctgataaaaagaacctgctgtgataagaccatcctcactgagaaataaaaaaaaaaaacaaaaaaccaacagcatgtgaaatcaggttacttgaaatttatgtaactctacaccaaggtattatgaatattatacaatctcattcatttccactcatgtcctgctcttccatagtacactcaagtttattttacatttcatggagacatattactttttctaatgattttttttctttctgtcaaagtacaaagcataccaatatggtcatttgctccaatatagcccaacggatggtatttttttattaataaaatgtggaagtaactagtatgtttttatggggaaaattacaaaataagtttaccaaaatagactggatcactaaaacaagaagaatggtttggcatatataacttttaaaagtatggtaacaaaacaaactgttaagttccattttacctggtattatctgttccttctgattaaaagaattagatttgagaaaatcacatctatctcttgagtacaaattagctatcactttttagatgaccatgccattcttcagtttttgatatagcttccaaacagaagtttcaaaatgactctgcctagcaaacacatcactgtactttaaacagagtgatgttttctatcccatattttcggaaggttaaagcacacacagaggcaagaatcatgacagacagcagatcctaagagagtttattaactctttaggtagattaggcaacacttgtttttaaactaactacaaatcaaagtctttttttttttaaatgattcaacattactaccatgctaccaacagatacataagggagagaaaaaaaaaagggctgcctgttccgaactctgcttacctaaaatttgcatctagtcacgtgccatttttagaagatgtccccttctgagataatcaagatacttgtacaacagggaatttagacttaattaccaaactttaataccatgttatataggtcaagtgagtatgtatacctttctccagaaacaaaggaattccgaataataggatttcagatttaattgtagaattagcaaaatgttttgagaatgtcatttaccgcaacacaaatcaatattaaatgctttatgcaggaagcacactttcagaaaatgggccgtaaagctttctgggatccgaccctaattactagagcaggctcttgccgtttgtctctctcttcaattatttacagggcaaaaaagccaaatggcattgcattagctacattaaatggtatggacttggtttctaacttactaatggtatataaaaattactaaggtaaatgtgcctgtagaaacatggctttttttcttcctcacctgagtgggtgtatttattattcatattgttaagtgttgaataagctgtcctttaggcacccaatgctgcataatttaaacaagtgcattaaatatataagatatctaaaaggtagtgcattgattatgccacaaaatttctttgaacagctaccatgtagctcacagaaaactagcatctcctgcaagttcctaaaacaaatactgtgagaactacacagagatgaataaggggtatccttgctgctaccatcttgctgctttctggtgacccaaagtaaagtgggaattgggggaagtgaaaatgaggcccgggattgctaggacatttctggtctcgaaactgacaagtgtcctttttacgtagacaaatacagggctatgtcgtaagtacatgaaaacgtggaccacacacattctaagaaagaaaaggctgaatcagagattctttgtaccaggccggaaatgcccaactaccagcaagcagagcatgattacaacctcccaaagaaagttcggacactgcatccatacctgattcttttgtgatctagaagggcacccagagttgtgatagatgttaatggctgaagaaggctgctgcgtccaacttccaccctcccaaattctggcggctgcttccaaagcagtgaaatttccagtcttcatggcccaaataatttttttaaatgagttcgggaggcatcaaattcttattgtaaaaataagataggcccactaacaaagtacccagggtccctagaaagccaggcgcaatttgtatggctacatgtcatcaactgttgttacccaagagtgtgccgaggtcactttttaaaaagcaacattggaaatcgatctgtggcaaacatataagctagttttgtttttgtttcttttttaaccaaatacgaagtcacttctttctctgcactgaaatctgcccattgtccctcctttgcaaaacctctagagattagaagggacatcaatgaacgcgagtgaactttggccacttttctacccaaaacaccagcgtaaaagtagaaatcagtaaccaggtgaagtgccacaccgcacaaagatcagaggcgaggggcgggcgctcagggccggaggcggggaggaaaatatcccggccccgccgcccctccagccccagtcatcgcgtgcgcgggaggtggaggggcgtccctggggggcgggaggctccgcgccacggcgaggggagcgaagagttacagcttacagggcgaggcccttggagaaggggtcgaaaagccgggccaccagcggatccagacgcgcacaccaggcgacggccgccggccagccagggctcggcgaggggcgccgctcgaccccacgaccctccccgctggccgggccaggaaggggctggtggctctttcctgtctagtctctccccccgcggctttctgtaacccgatccccgcactccgctcccagggaagccgccgccccgcgcgccgcccggctctgcccaggccagcgctatagttagcaaccttccagcaactccgcccggcggtggcgggggttcgccgcgcgcccccctccccaggcctgaccctgcgcgcgtccccgggccccctcctccggccgtcacctctccccggcgcccctttaccttggcttgcagatactgggggtaatagtaggtggcgtactgagggtacatctgctgtttccacactttgcccatgaagctggaagggagcctgccgtgcagggtcgcggacactttggggtttccaagtctcgggctctcctgcctctccctttccggcggcggcggcagcggcggcggcggcggcggctgctgctgctgccgctgctccacctcccagccgggaccagacgtcctcctcctcctcctcctcttcctcctcctcctcctcctcctcctcctcttcctcctcctcctcctcctcccaggcagaaagaaagacactgcagagcgcagagggcaccccggacagggcgctcccaaggagtttcctcccggagcccgactgctccggggctgccaagggctggcgcgctggccgcggtccgctcgggcgagccggctgcgcggggctgagaggtgatcaatacaagtggaaagtgcggcagcggcggctgcgcttggtgccaggcggcatctggggtgggtgcgcccgatgtggagagaggagaggggctggcgttccgaggccgtgggggaagggcgggcgggggcggggcctgggcgccgccgagcccgggacccgctggaggtgagggctgagttttaaccactcctcacctcccaggctcgcggttggacgggcggaagccctgtgagtccagatcgctttgtgtcgggggtggggaaatgggagtgggagtgggggtggagggggaatgcggggggacccagcttaagaactgcagggcgggcacctcttttgctttcccgagtttttatcttcgtaagggggaggggaaataagggaaaagaggaaatctgattaatcgttcacttcccaccgcccagtaattttttttcacaagggaaggaaaatgatttaatgcccaacaaagctggagtctggacacctgggttctgttcctcccacccacccccgacccggggccacaagactaatctaggtgaccttgggagggttagcgtccttcggtttggttttcccagatgtgagacgtgaaatcatgccccttgcacaaggggaggcaaagcacatacatacatacacacacacacacacacacacacacacccctcacaacatatagacggatccttctaagagggggatgccgcaaagaggcagaatgttattagaggacacaatatagacatcagcttttctctgcctctttctaatgctgccagacagtctgtcaactcccactcaggagcaaggaaactccctgagtttggaatattttaaggccattttgaaagtcacgctggcatattgttgcagtgtgcttcagtgacatataaaatcaatctctctttctgcctctctccatctcctaattgtcacagctctagacagcctcagaccagcagtggttcagttcactacataactagatataatttaatggaattaattggtccccgaagctgcctgcagaagacttttatattccagctcaaaaagagagctaataccaaaatgtacatacggatagcataggtaagcaagcatcctcaaattagggttccggcacatctaataaaatgtaataaaaaactgtgtttgttattaaatagaccttgtttactttgtcattttggtttttgaagagtcttttgttaatagcacaaggtaaattaaactcaactggaatgcattattttgttaaacagttattatttttatatgataacattttaaaataggtttagtaagatactttaaaacaatgacaaaataaggacctgaaacccttataatcgttctatggtttagacaaatttctagatcttacatgtttgacaaaaacaaaataaatataagtataggtgagaacattttggctctgccaggaggcaaatcatgtccctctcatttacctatgtaaaagcctataaggaagctaatatttactatgtctgctatattgtaggcactgttgaggtgcatgcaga
